(19) United States
(12) Patent Application Publication
(10) Pub. No.: US 2024/0294985 A1
(43) Pub. Date: Sep. 5, 2024

(54) PREECLAMPSIA DIAGNOSIS

(71) Applicant: Katholieke Universiteit Leuven, Leuven (BE)

(72) Inventors: Bernard Thienpont, Kessel-Lo (BE); Marie DE Borre, Mechelen (BE); Qian Yu, Heverlee (BE); Huiwen CHE, Leuven (BE); Kristel Van Calsteren, Wezemaal (BE)

(21) Appl. No.: 18/282,138

(22) PCT Filed: Mar. 15, 2022
(86) PCT No.: PCT/EP2022/056679

§ 371 Date: Sep. 14, 2023

(30) Foreign Application Priority Data
Mar. 15, 2021 (EP) 21162527.2

(51) Int. Cl. C12Q 1/6883

(52) U.S. Cl. CPC C12Q 1/6883; C12Q 2600/154

(57) ABSTRACT

The present invention relates to a method for the prediction of the risk of developing preeclampsia in a pregnant human subject, wherein said subject's gestational age is under 140 days, comprising the steps of: (a) measuring in a sample from said subject a plurality of loci-specific DNA methylation levels; (b) deriving from said measurement a DNA methylation profile for said subject (c) comparing said DNA methylation profile to one or more reference DNA methylation profile(s) corresponding to preeclampsia risk group; and (d) assigning on the basis of said comparison said subject to a preeclampsia risk group, thereby predicting the risk of developing preeclampsia in said subject.

### FIELD OF THE INVENTION

[0001] The present invention relates to methods for the prediction of the risk of developing preeclampsia. In particular the present invention relates to use of the measure of DNA methylation level for the presymptomatic prediction of the risk of developing preeclampsia.

### BACKGROUND OF THE INVENTION

[0002] Preeclampsia is a prevalent source of intra-uterine growth retardation (IUGR), premature delivery and low birth weight. It is the third leading cause for peripartal mortality and morbidity in expectant mothers worldwide, and it is associated with a significant societal burden because of the extensive perinatal care it requires and the potential complications in the offspring later in life. Although the pathology is thought to be initiated already in the early weeks of pregnancy, symptoms of new onset hypertension and proteinuria are only evident from the second half of the pregnancy. In order to prevent the acute and chronic consequences of preeclampsia, early identification of pregnant women at risk is essential. For example, administration of low-dose aspirin to high-risk women before 16 weeks of gestation significantly reduces the incidence of preterm preeclampsia and IUGR. In this context, a prognostic test would have a strong clinical impact by both enabling closer monitoring and early pharmacological intervention when necessary.

[0003] The pathogenesis of preeclampsia is incompletely understood, but likely multifactorial, with preeclampsia risk being influenced by BMI, parity and other factors. A number of maternal characteristics and risk factors associated with the development of preeclampsia have been used to develop several first trimester screening models to identify women at risk for developing preeclampsia. Examples of risk factors include a previous pregnancy complicated by preeclampsia, or twin pregnancies. However, screening models that are solely based on maternal demographic characteristics and medical history typically have a low detection rate and are therefore inadequate for effective prediction. The placenta appears critical in the pathophysiology of preeclampsia, as (i) presence of placental tissue is sufficient for development of the disease and (ii) preeclampsia is cured within days or weeks after delivery of the placenta. It is likely that the pathogenic process is initiated during the first trimester, long before clinical manifestations. Indeed, at 10-12 weeks of gestation, gene expression changes were already evident in chorionic villus samples from women subsequently diagnosed with preeclampsia. Histological comparison of placentas from normal and preeclamptic pregnancies showed preeclampsia-associated defects in spiral artery remodeling and trophoblast invasion, causing placental hypoperfusion, impaired placentation, placental hypoxia and ischemia. While phenotyping or genotyping the placenta early in gestation is feasible through chorionic villous sampling, this approach is invasive and associated with a significant risk for pregnancy loss, greatly precluding its application as a screening tool.

[0004] Therefore, there is still a need for a robust and non-invasive method for the presymptomatic detection of preeclampsia.

### SUMMARY

[0005] The present invention relates to a method for the prediction of the risk of developing preeclampsia in a pregnant human subject, wherein said subject's gestational age is under 140 days, comprising the steps of:
[0006] a. measuring in a sample from said subject a plurality of loci-specific DNA methylation levels;
[0007] b. deriving from said measurement a DNA methylation profile for said subject;
[0008] c. comparing said DNA methylation profile to,
   [0009] i. a reference DNA methylation profile corresponding to a high risk of preeclampsia group; and/or,
   [0010] ii. a reference DNA methylation profile corresponding to a low risk of preeclampsia group; and,
[0011] d. assigning on the basis of said comparison said subject to a preeclampsia risk group, thereby predicting the risk of developing preeclampsia in said subject.

[0012] In one embodiment, said measuring step comprises measuring a plurality of loci-specific DNA methylation levels in a set of genomic regions comprising 10 genomic regions wherein each of said 10 genomic regions is distinct and defined in reference to one of SEQ ID NO: 601 to 3472, as found in the human genome build Grch37/hg19.

[0013] In one embodiment, said measuring step comprises measuring a plurality of loci-specific DNA methylation levels in a set of genomic regions comprising 10 genomic regions wherein each of said 10 genomic regions is distinct and defined in reference to one of SEQ ID NO: 601 to 1768, as found in the human genome build Grch37/hg19.

[0014] In one embodiment, said measuring step comprises measuring a plurality of loci-specific DNA methylation levels in a set of genomic regions comprising 10 genomic regions wherein each of said 10 genomic regions is distinct and defined in reference to one of SEQ ID NO: 601 to 1026, as found in the human genome build Grch37/hg19.

[0015] In one embodiment, said measuring step comprises measuring a plurality of loci-specific DNA methylation levels in a set of genomic regions comprising 10 genomic regions wherein each of said 10 genomic regions is distinct and defined in reference to one of SEQ ID NO: 601 to 652, as found in the human genome build Grch37/hg19.

[0016] In one embodiment, said measuring step comprises measuring a plurality of loci-specific DNA methylation levels in a set of genomic regions comprising 10 genomic regions wherein each of said 10 genomic regions is distinct and defined in reference to one of SEQ ID NO: 601 to 610, as found in the human genome build Grch37/hg19.

[0017] In one embodiment, said measuring step comprises measuring a plurality of loci-specific DNA methylation levels in a set of genomic regions comprising 11 genomic regions wherein each of said 11 genomic regions is distinct and defined in reference to one of SEQ ID NO: 601 to 611, as found in the human genome build Grch37/hg19.

[0018] In one embodiment, said measuring step comprises measuring a plurality of loci-specific DNA methylation levels in a set of genomic regions comprising 12 genomic regions wherein each of said 12 genomic regions is distinct and defined in reference to one of SEQ ID NO: 601 to 612, as found in the human genome build Grch37/hg19.

[0019] In one embodiment, said measuring step comprises measuring a plurality of loci-specific DNA methylation levels in a set of genomic regions comprising 29 genomic regions wherein each of said 29 genomic regions is distinct and defined in reference to one of SEQ ID NO: 601 to 629, as found in the human genome build Grch37/hg19.

[0020] In one embodiment, said subject's gestational age is under 133 days, preferably under 126 days or under 119 days, more preferably under 112 days.

[0021] In one embodiment, said subject's gestational age is ranging from 28 days to 111 days, preferably is ranging from 63 days to 104 days.

[0022] In one embodiment, said reference DNA methylation profile corresponding to a high risk of preeclampsia group is derived from the measure of said plurality of loci-specific DNA methylation levels in control subjects, preferably gestational age-matched control subjects, that developed preeclampsia at later stage of pregnancy.

[0023] In one embodiment, said reference DNA methylation profile corresponding to a low risk of preeclampsia group is derived from the measure of said plurality of loci-specific DNA methylation levels in control subjects, preferably gestational age-matched control subjects, that remained healthy in respect to preeclampsia during their pregnancy.

[0024] In one embodiment, said sample is a blood sample.

[0025] In one embodiment, said DNA is cell-free DNA, preferably circulating cell-free DNA. In one embodiment said DNA is circulating cell-free DNA.

[0026] In one embodiment, said DNA methylation is methylation of cytosine, preferably methylation of cytosine in a CpG dinucleotide.

[0027] In one embodiment, said measuring step comprises measuring a plurality of loci-specific DNA methylation levels in at least one genomic DNA region, wherein said at least one genomic region is defined in reference to one of SEQ ID NO: 1 to 600, as found in the human genome build Grch37/hg19, preferably in reference to one of SEQ ID NO: 1 to 200, as found in the human genome build Grch37/hg19.

[0028] In one embodiment, said measuring step comprises measuring a plurality of loci-specific DNA methylation levels in at least one genomic DNA region, wherein said at least one genomic DNA region consists of a sequence having at least 95% sequence identity with a sequence selected from the group consisting of SEQ ID NO: 1 to 600, preferably selected from the group consisting of SEQ ID NO: 1 to 200.

[0029] The present invention also relates to a kit comprising a set of capture probes specific for at least 2 genomic DNA regions, wherein each of said at least two genomic regions are distinct and defined in reference to one of SEQ ID NO: 1 to 600, as found in the human genome build Grch37/hg19, preferably in reference to one of SEQ ID NO: 1 to 200, as found in the human genome build Grch37/hg19.

[0030] In one embodiment, said kit comprising a set of capture probes specific for at least 10 genomic regions, wherein each of said at least 10 genomic regions are distinct and defined in reference to one of SEQ ID NO: 601 to 3472, as found in the human 5 genome build Grch37/hg19.

[0031] In one embodiment, said kit comprising a set of capture probes specific for at least 10 genomic regions, wherein each of said at least 10 genomic regions are distinct and defined in reference to one of SEQ ID NO: 601 to 610, as found in the human 10 genome build Grch37/hg19.

[0032] The present invention also relates to the use of the kit of the invention for the prediction of the risk of developing preeclampsia in a human subject.

### Definitions

[0033] In the present invention, the following terms have the following meaning.

[0034] As used herein, the term “DNA methylation” refers to covalent attachment of a methyl or hydroxymethyl group on one more nucleotide present in a deoxyribonucleic acid (DNA) molecule. The term includes, without being limited to, methylation of cytosine, the covalent attachment of a methyl or hydroxymethyl group at the position 5 of a cytosine's pyrimidine ring thereby forming 5-methylcytosine or 5-hydromethylcytosine. Methylation of cytosine is almost exclusively found in the DNA sequence context of a cytosine nucleotide is followed by a guanine nucleotide, referred herein as a CpG or a CG dinucleotide.

[0035] As used herein, the term “identity”, when used in a relationship between the sequences of two or more polypeptides or of two or more nucleic acid sequences, refers to the degree of sequence relatedness between polypeptides or nucleic acid sequences (respectively), as determined by the number of matches between strings of two or more amino acid residues or of two or more nucleotides, respectively. “Identity” measures the percent of identical matches between the smaller of two or more sequences with gap alignments (if any) addressed by a particular mathematical model or computer program (i.e., “algorithms”). Identity of related polypeptides or NA sequences can be readily calculated by known methods. Such methods include, but are not limited to, those described in Arthur M. Lesk, Computational Molecular Biology: Sources and Methods for Sequence Analysis (New-York: Oxford University Press, 1988); Douglas W. Smith, Biocomputing: Informatics and Genome Projects (New-York: Academic Press, 1993); Hugh G. Griffin and Annette M. Griffin, Computer Analysis of Sequence Data, Part 1 (New Jersey: Humana Press, 1994); Gunnar von Heinje, Sequence Analysis in Molecular Biology: Treasure Trove or Trivial Pursuit (Academic Press, 1987); Michael Gribskov and John Devereux, Sequence Analysis Primer (New York: M. Stockton Press, 1991); and Carillo et al., 1988. SIAM J. Appl. Math. 48(5): 1073-1082. Preferred methods for determining identity are designed to give the largest match between the sequences tested. Methods of determining identity are described in publicly available computer programs. Preferred computer program methods for determining identity between two sequences include the GCG program package, including GAP (Devereux et al., 1984. Nucl. Acid. Res. 12(1 Pt 1):387-395; Genetics Computer Group, University of Wisconsin Biotechnology Center, Madison, WI), BLASTP, BLASTN, TBLASTN and FASTA (Altschul et al., 1990. J. Mol. Biol. 215(3): 403-410). The BLASTX program is publicly available from the National Center for Biotechnology Information (NCBI) and other sources (BLAST Manual, Altschul et al. NCB/NLM/NIH Bethesda, Md. 20894; Altschul et al., 1990. J. Mol. Biol. 215(3): 403 410). The well-known Smith Waterman algorithm may also be used to determine identity.

[0036] As used herein, the term “gestational age” refers to the measure of the age, at the time of sample collection, of a subject's pregnancy which is taken from the beginning of the subject's last menstrual period (day 0). When expressed in week herein, the correspondence between weeks and days is as follows, week 0 correspond to a gestational age ranging 0 to 6 days, week 1 corresponds to a gestational age of 7 days to 13 days. The correspondence increment following the same progression. The skilled artisan is familiar with techniques to evaluate a subject's, a human subject in the context of the invention, gestational age. Such techniques include, without being limited to, direct calculation from the known first day of the last menstruation period, obstetric ultrasound, adding 14 days to a known duration following fertilization (useful for instance in the context of in vitro fertilization).

[0037] As used herein, the term “preeclampsia” refers to the multisystem disorder of pregnancy, also known as pre-eclampsia or preeclampsia toxaemia and characterized by new onset hypertension and often proteinuria in the second half of pregnancy. The term includes both early-onset preeclampsia and late-onset preeclampsia, depending on whether the diagnosis is made before week 34 of pregnancy or after. In one embodiment, preeclampsia is early onset-preeclampsia or late-onset preeclampsia. In one embodiment, preeclampsia is early-onset preeclampsia. In one embodiment, preeclampsia is late-onset preeclampsia.

### DETAILED DESCRIPTION

[0038] Here, the inventors have found that the risk of developing preeclampsia is associated with variations of the DNA methylation level at several positions within a sample of genomic DNA from a pregnant subject and that said variations are detectable before the onset of preeclampsia symptoms, in particular in the first trimester of pregnancy. The inventors have hence developed methods for the presymptomatic prediction of the risk of developing preeclampsia based on the measure of loci-specific DNA methylation levels. They have found that such preeclampsia-associated changes in the DNA methylation profile are detectable by measuring loci-specific DNA methylation levels of cell free DNA found in non-invasively accessible blood plasma samples. The method of the invention thus allows for the robust presymptomatic prediction of the risk of developing preeclampsia, and it may be implemented on samples that may be obtained using non-invasive sampling.

[0039] The present invention relates to a method for the prediction of the risk of developing preeclampsia in a human subject.

[0040] In one embodiment, the method of the invention is for the stratification of a subject for her preeclampsia risk, for the evaluation of the risk of developing preeclampsia in a subject, for the prognosis of preeclampsia in a subject and/or for the prediction of the risk of developing preeclampsia in a subject.

[0041] In one embodiment, the method of the invention is used before the onset or appearance of at least one, preferably at least two, symptom of preeclampsia in the subject. In one embodiment, the symptom of preeclampsia is a new-onset symptom.

[0042] Examples of symptoms of preeclampsia include, without being limited to, hypertension, proteinuria, uteroplacental dysfunction, thrombocytopenia, renal insufficiency, elevated liver transaminases, pulmonary edema and neurological complications, such as for example eclampsia, altered mental status, severe headaches and persistent visual scotomata.

[0043] In one embodiment, the method of the invention is used before the onset or appearance of hypertension and at least one other symptoms of preeclampsia in the subject. In one embodiment, the method of the invention is used before the onset of hypertension and at least one other symptoms of preeclampsia in the subject, wherein said at least one other symptoms of preeclampsia is selected from the group consisting of proteinuria, uteroplacental dysfunction, thrombocytopenia, renal insufficiency, elevated liver transaminases, pulmonary edema, eclampsia, altered mental status, severe headaches and persistent visual scotomata.

[0044] In one embodiment, the method of the invention is for the presymptomatic stratification of a pregnant subject for her preeclampsia risk, for the presymptomatic evaluation of the risk of developing preeclampsia in a subject, for the presymptomatic prognosis of preeclampsia in a subject and/or for the presymptomatic prediction of the risk of developing preeclampsia in a subject.

[0045] In one embodiment, the method of the invention is for the presymptomatic prediction of the risk of developing preeclampsia in a subject.

[0046] In the context of the invention, the subject is human. In one embodiment, the subject is pregnant or has presumptive signs of pregnancy.

[0047] In one embodiment, the subject is pregnant with twins. In one embodiment, the subject had preeclampsia in a previous pregnancy. In one embodiment, the subject is pregnant with a single embryo. In one embodiment, the subject has no history of preeclampsia.

[0048] In one embodiment, the subject is substantially healthy in respect to preeclampsia. In one embodiment, the subject is does not have at least one, preferably at least two, preeclampsia symptoms. In one embodiment, the subject does not have at least one of the symptoms, preferably new-onset symptom, of preeclampsia, wherein said at least one symptom of preeclampsia is selected from the group consisting of hypertension, proteinuria, uteroplacental dysfunction, thrombocytopenia, renal insufficiency, elevated liver transaminases, pulmonary edema, eclampsia, altered mental status, severe headaches and persistent visual scotomata. In one embodiment, the subject does not have hypertension, preferably new-onset hypertension, and at least one other symptoms, preferably new-onset symptom, of preeclampsia, wherein and said at least one other symptoms of preeclampsia is selected from the group consisting of proteinuria, uteroplacental dysfunction, thrombocytopenia, renal insufficiency, elevated liver transaminases, pulmonary edema, eclampsia, altered mental status, severe headaches and persistent visual scotomata.

[0049] In one embodiment, the subject's gestational age is under 240 days, preferably under 231 days, 224 days, 217 days, 210 days, 203 days, 196 days, 189 days, 182 days, 175 days, 168 days, 161 days, 154 days or under 147 days, more preferably under 140 days, 133 days, 126 days, 119 days or under 112 days, even more preferably under 105 days. In one embodiment, the subject's gestational age is under 133 days, preferably under 126 days or under 119 days more preferably under 112 days.

[0050] In one embodiment, the subject's gestational age is above 27 days, preferably above 34 days, 41 days, 48 days or above 55 days, more preferably above 62 days.

[0051] In one embodiment, the subject gestational age is ranging from 28 days to 237 days, preferably is ranging from 28 days to 223 days, from 28 days to 209 days, from 28 days to 195 days, from 28 days to 181 days, from 28 days to 167 days, from 28 days to 160, from 28 days to 153 days or from 28 days to 146 days, more preferably ranging from 28 days to 139 days, from 28 days to 132 days, from 28 days to 125 days, from 28 days to 118 days, from 28 days to 111 days or from 28 days to 104, even more preferably ranging from 35 days to 104 days, from 42 days to 104 days, from 49 days to 104 days, from 56 days to 104 days or from 63 days to 104 days. In one embodiment, the subject gestational age is ranging from 28 days to 111 days, preferably is ranging from 63 days to 104 days.

[0052] In one embodiment, the method of the invention is for the prediction, preferably presymptomatic prediction, of the risk of developing preeclampsia in a human, wherein said subject's gestational age is under 140 days.

[0053] In one embodiment, the method of the invention comprises a step of measuring in a sample from the subject at least one, or a plurality of, loci-specific DNA methylation level(s). In one embodiment, the method of the invention comprises a step of measuring in a sample from the subject a plurality of loci-specific DNA methylation level(s).

[0054] As used herein, the term loci-specific DNA methylation refers to DNA methylation of a nucleotide at a specific location in a DNA sequence. The term is defined in opposition to global DNA methylation that can be assayed without retaining information of the localization (or locus) of the nucleotide considered in the DNA sequence.

[0055] The skilled artisan is familiar with techniques allowing the measure of loci-specific DNA methylation level. Such techniques include, without being limited to, bisulfite sequencing, enzymatic methylome sequencing, TET-assisted pyridine borane sequencing, DNA immunoprecipitation, direct or native 5-methylcytosine or 5-hydroxymethylcytosine sequencing and the like.

[0056] In one embodiment, DNA methylation is methylation of cytosine, preferably methylation of cytosine in a CpG dinucleotide.

[0057] In one embodiment, said DNA is genomic DNA. As used herein, the term genomic DNA refers to the nuclear genome. In one embodiment, said DNA is cell-free DNA, preferably circulating cell-free DNA (cfDNA). As used herein, the term cell-free DNA refers to DNA found in the bodily fluids of the subject outside of said subject's cells. Examples of bodily fluid that may be considered in the context of the invention include, without being limited to, blood, plasma, serum, cervical smear and amniotic fluid. The term circulating cell-free DNA refers to cell-free DNA found in blood, plasma or serum. In one embodiment, said DNA is cell-free genomic DNA. In one embodiment, said DNA is human DNA. In one embodiment, said DNA is cell-free human genomic DNA.

[0058] In one embodiment, the method of the invention comprises a step of measuring in a sample from the subject at least one, or a plurality of, loci-specific DNA methylation level(s) in at least one, or in a set of, genomic region(s). It is to be understood that in the context of the invention, when a plurality of loci-specific DNA methylation levels are measured in a plurality of genomics regions, at least one loci-specific DNA methylation level is measured in each of said genomic regions.

[0059] As used herein, the terms genomic region or genomic DNA region refers to a portion or fragment of the genome, in the context of the invention, of the human nuclear genome. Genomic regions are identified or defined by the location in the genome of where they begin and end. The location of the begin and end points of a given genomic region may, for instance and without limitation, be identified or defined by their coordinates given as the combination of the identification of the reference of the genome sequence used, the chromosome number, if applicable, and the nucleotide coordinate on the reference strand (also known as the top strand, the Watson strand or the +strand) and with the base coordinate system used for the reference of the genome sequence used (e.g. human genome build Grch37/hg19; chr5:43,484,005-43,484,180 in the one-based coordinate system corresponds to a specific region of SEQ ID NO: 1 in the human genome). The location of the begin and end points of a given genomic region may also, for instance and without limitation, be identified by or defined by or defined in reference to the provision of its nucleic acid sequence. It is then within the reach of the skilled artisan provided with the nucleic acid sequence of a genomic region to locate its position within a given species' genome using sequence comparison tools such as for instance and without limitation, using BLAT (Kent, Genome Research 4: 656-664).

[0060] As used herein, the terms human genome build Grch37/hg19 is used in reference to the assembly available under the Genbank Assembly Accession number GCA_000001405.1.

[0061] In one embodiment, said genomic region comprises one or more CpG dinucleotide.

[0062] In one embodiment, the method of the invention comprises a step of measuring in a sample from the subject a plurality of loci-specific DNA methylation levels in at least 2, 3, 4, 5, 6, 7, 8, 9, 10, 11, 12, 13, 14, 15, 16, 17, 18, 19, 20, 21, 22, 23, 24, 25, 26, 27, 28, 29, 30, 31, 32, 33, 34, 35, 36, 37, 38, 39, 40, 41, 42, 43, 44, 45, 46, 47, 48, 49, 50, 51, 52, 53, 54, 55, 56, 57, 58, 59, 60, 61, 62, 63, 64, 65, 66, 67, 68, 69, 70, 71, 72, 73, 74, 75, 76, 77, 78, 79, 80, 81, 82, 83, 84, 85, 86, 87, 88, 89, 90, 91, 92, 93, 94, 95, 96, 97, 98, 99, 100, 101, 102, 103, 104, 105, 106, 107, 108, 109, 110, 111, 112, 113, 114, 115, 116, 117, 118, 119, 120, 121, 122, 123, 124, 125, 126, 127, 128, 129, 130, 131, 132, 133, 134, 135, 136, 137, 138, 139, 140, 141, 142, 143, 144, 145, 146, 147, 148, 149, 150, 151, 152, 153, 154, 155, 156, 157, 158, 159, 160, 161, 162, 163, 164, 165, 166, 167, 168, 169, 170, 171, 172, 173, 174, 175, 176, 177, 178, 179, 180, 181, 182, 183, 184, 185, 186, 187, 188, 189, 190, 191, 192, 193, 194, 195, 196, 197, 198 or 199, preferably at least 200, 201, 202, 203, 204, 205, 206, 207, 208, 209, 210, 211, 212, 213, 214, 215, 216, 217, 218, 219, 220, 221, 222, 223, 224, 225, 226, 227, 228, 229, 230, 231, 232, 233, 234, 235, 236, 237, 238, 239, 240, 241, 242, 243, 244, 245, 246, 247, 248, 249, 250, 251, 252, 253, 254, 255, 256, 257, 258, 259, 260, 261, 262, 263, 264, 265, 266, 267, 268, 269, 270, 271, 272, 273, 274, 275, 276, 277, 278, 279, 280, 281, 282, 283, 284, 285, 286, 287, 288, 289, 290, 291, 292, 293, 294, 295, 296, 297, 298, 299, 300, 301, 302, 303, 304, 305, 306, 307, 308, 309, 310, 311, 312, 313, 314, 315, 316, 317, 318, 319, 320, 321, 322, 323, 324, 325, 326, 327, 328, 329, 330, 331, 332, 333, 334, 335, 336, 337, 338, 339, 340, 341, 342, 343, 344, 345, 346, 347, 348, 349, 350, 351, 352, 353, 354, 355, 356, 357, 358, 359, 360, 361, 362, 363, 364, 365, 366, 367, 368, 369, 370, 371, 372, 373, 374, 375, 376, 377, 378, 379, 380, 381, 382, 383, 384, 385, 386, 387, 388, 389, 390, 391, 392, 393, 394, 395, 396, 397, 398, 399, 400, 401, 402, 403, 404, 405, 406, 407, 408, 409, 410, 411, 412, 413, 414, 415, 416, 417, 418, 419, 420, 421, 422, 423, 424, 425, 426, 427, 428, 429, 430, 431, 432, 433, 434, 435, 436, 437, 438, 439, 440, 441, 442, 443, 444, 445, 446, 447, 448, 449, 450, 451, 452, 453, 454, 455, 456, 457, 458, 459, 460, 461, 462, 463, 464, 465, 466, 467, 468, 469, 470, 471, 472, 473, 474, 475, 476, 477, 478, 479, 480, 481, 482, 483, 484, 485, 486, 487, 488, 489, 490, 491, 492, 493, 494, 495, 496, 497, 498, 499, 500, 501, 502, 503, 504, 505, 506, 507, 508, 509, 510, 511, 512, 513, 514, 515, 516, 517, 518, 519, 520, 521, 522, 523, 524, 525, 526, 527, 528, 529, 530, 531, 532, 533, 534, 535, 536, 537, 538, 539, 540, 541, 542, 543, 544, 545, 546, 547, 548, 549, 550, 551, 552, 553, 554, 555, 556, 557, 558, 559, 560, 561, 562, 563, 564, 565, 566, 567, 568, 569, 570, 571, 572, 573, 574, 575, 576, 577, 578, 579, 580, 581, 582, 583, 584, 585, 586, 587, 588, 589, 590, 591, 592, 593, 594, 595, 596, 597, 598, 599, or at least 600 genomic regions.

[0063] In one embodiment, the method of the invention comprises a step of measuring in a sample from the subject at least one, or a plurality of, loci-specific DNA methylation level(s) in at least one genomic region, wherein said at least one genomic region is identified by sequence comparison as corresponding to, or defined by, or defined in reference to, one of SEQ ID NO: 1 to 600, as found in the human genome build Grch37/hg19, preferably is identified by sequence comparison as corresponding to, or defined by, or defined in reference to, one of SEQ ID NO: 1 to 200, as found in the human genome build Grch37/hg19.

[0064] In one embodiment, the method of the invention comprises a step of measuring in a sample from the subject at least one, or a plurality of, loci-specific DNA methylation level(s) in at least one genomic region, wherein said at least one genomic region consists of a sequence having at least 90%, 91%, 92%, 93% or 94%, preferably having at least 95%, 96%, 97%, or 98%, more preferably having at least 99% sequence identity with a sequence selected from the group consisting of SEQ ID NO: 1 to 600, preferably selected from the group consisting of SEQ ID NO: 1 to 200. In one embodiment, said at least one genomic region consists of a sequence selected from the group consisting of SEQ ID NO: 1 to 600. In one embodiment, said at least one genomic region consists of a sequence selected from the group consisting of SEQ ID NO: 1 to 200.

[0065] In one embodiment, the method of the invention comprises a step of measuring in a sample from the subject a plurality of loci-specific DNA methylation levels in a set of genomic regions, wherein said set of genomic regions comprises, or consists of, 2, 3, 4, 5, 6, 7, 8, 9, 10, 11, 12, 13, 14, 15, 16, 17, 18, 19, 20, 21, 22, 23, 24, 25, 26, 27, 28, 29, 30, 31, 32, 33, 34, 35, 36, 37, 38, 39, 40, 41, 42, 43, 44, 45, 46, 47, 48, 49, 50, 51, 52, 53, 54, 55, 56, 57, 58, 59, 60, 61, 62, 63, 64, 65, 66, 67, 68, 69, 70, 71, 72, 73, 74, 75, 76, 77, 78, 79, 80, 81, 82, 83, 84, 85, 86, 87, 88, 89, 90, 91, 92, 93, 94, 95, 96, 97, 98, 99, 100, 101, 102, 103, 104, 105, 106, 107, 108, 109, 110, 111, 112, 113, 114, 115, 116, 117, 118, 119, 120, 121, 122, 123, 124, 125, 126, 127, 128, 129, 130, 131, 132, 133, 134, 135, 136, 137, 138, 139, 140, 141, 142, 143, 144, 145, 146, 147, 148, 149, 150, 151, 152, 153, 154, 155, 156, 157, 158, 159, 160, 161, 162, 163, 164, 165, 166, 167, 168, 169, 170, 171, 172, 173, 174, 175, 176, 177, 178, 179, 180, 181, 182, 183, 184, 185, 186, 187, 188, 189, 190, 191, 192, 193, 194, 195, 196, 197, 198 or 199, preferably comprises or consists of, 200, 201, 202, 203, 204, 205, 206, 207, 208, 209, 210, 211, 212, 213, 214, 215, 216, 217, 218, 219, 220, 221, 222, 223, 224, 225, 226, 227, 228, 229, 230, 231, 232, 233, 234, 235, 236, 237, 238, 239, 240, 241, 242, 243, 244, 245, 246, 247, 248, 249, 250, 251, 252, 253, 254, 255, 256, 257, 258, 259, 260, 261, 262, 263, 264, 265, 266, 267, 268, 269, 270, 271, 272, 273, 274, 275, 276, 277, 278, 279, 280, 281, 282, 283, 284, 285, 286, 287, 288, 289, 290, 291, 292, 293, 294, 295, 296, 297, 298, 299, 300, 301, 302, 303, 304, 305, 306, 307, 308, 309, 310, 311, 312, 313, 314, 315, 316, 317, 318, 319, 320, 321, 322, 323, 324, 325, 326, 327, 328, 329, 330, 331, 332, 333, 334, 335, 336, 337, 338, 339, 340, 341, 342, 343, 344, 345, 346, 347, 348, 349, 350, 351, 352, 353, 354, 355, 356, 357, 358, 359, 360, 361, 362, 363, 364, 365, 366, 367, 368, 369, 370, 371, 372, 373, 374, 375, 376, 377, 378, 379, 380, 381, 382, 383, 384, 385, 386, 387, 388, 389, 390, 391, 392, 393, 394, 395, 396, 397, 398, 399, 400, 401, 402, 403, 404, 405, 406, 407, 408, 409, 410, 411, 412, 413, 414, 415, 416, 417, 418, 419, 420, 421, 422, 423, 424, 425, 426, 427, 428, 429, 430, 431, 432, 433, 434, 435, 436, 437, 438, 439, 440, 441, 442, 443, 444, 445, 446, 447, 448, 449, 450, 451, 452, 453, 454, 455, 456, 457, 458, 459, 460, 461, 462, 463, 464, 465, 466, 467, 468, 469, 470, 471, 472, 473, 474, 475, 476, 477, 478, 479, 480, 481, 482, 483, 484, 485, 486, 487, 488, 489, 490, 491, 492, 493, 494, 495, 496, 497, 498, 499, 500, 501, 502, 503, 504, 505, 506, 507, 508, 509, 510, 511, 512, 513, 514, 515, 516, 517, 518, 519, 520, 521, 522, 523, 524, 525, 526, 527, 528, 529, 530, 531, 532, 533, 534, 535, 536, 537, 538, 539, 540, 541, 542, 543, 544, 545, 546, 547, 548, 549, 550, 551, 552, 553, 554, 555, 556, 557, 558, 559, 560, 561, 562, 563, 564, 565, 566, 567, 568, 569, 570, 571, 572, 573, 574, 575, 576, 577, 578, 579, 580, 581, 582, 583, 584, 585, 586, 587, 588, 589, 590, 591, 592, 593, 594, 595, 596, 597, 598, 599 or 600 genomic regions, wherein each of said genomics regions is distinct and identified by sequence comparison as corresponding to, or defined by, or defined in reference to, one of SEQ ID NO: 1 to 600, as found in the human genome build Grch37/hg19.

[0066] In one embodiment, the method of the invention comprises a step of measuring in a sample from the subject a plurality of loci-specific DNA methylation levels in a set of genomic regions, wherein said set of genomic regions comprises, or consists of, 2, 3, 4, 5, 6, 7, 8 or 9, preferably comprises or consists of 10 or 11, more preferably comprises or consists of, 12, 13, 14, 15, 16, 17, 18, 19, 20, 21, 22, 23, 24, 25, 26, 27, 28, 29, 30, 31, 32, 33, 34, 35, 36, 37, 38, 39, 40, 41, 42, 43, 44, 45, 46, 47, 48, 49, 50, 51, 52, 53, 54, 55, 56, 57, 58, 59, 60, 61, 62, 63, 64, 65, 66, 67, 68, 69, 70, 71, 72, 73, 74, 75, 76, 77, 78, 79, 80, 81, 82, 83, 84, 85, 86, 87, 88, 89, 90, 91, 92, 93, 94, 95, 96, 97, 98, 99, 100, 101, 102, 103, 104, 105, 106, 107, 108, 109, 110, 111, 112, 113, 114, 115, 116, 117, 118, 119, 120, 121, 122, 123, 124, 125, 126, 127, 128, 129, 130, 131, 132, 133, 134, 135, 136, 137, 138, 139, 140, 141, 142, 143, 144, 145, 146, 147, 148, 149, 150, 151, 152, 153, 154, 155, 156, 157, 158, 159, 160, 161, 162, 163, 164, 165, 166, 167, 168, 169, 170, 171, 172, 173, 174, 175, 176, 177, 178, 179, 180, 181, 182, 183, 184, 185, 186, 187, 188, 189, 190, 191, 192, 193, 194, 195, 196, 197, 198 199, 200, 201, 202, 203, 204, 205, 206, 207, 208, 209, 210, 211, 212, 213, 214, 215, 216, 217, 218, 219, 220, 221, 222, 223, 224, 225, 226, 227, 228, 229, 230, 231, 232, 233, 234, 235, 236, 237, 238, 239, 240, 241, 242, 243, 244, 245, 246, 247, 248, 249, 250, 251, 252, 253, 254, 255, 256, 257, 258, 259, 260, 261, 262, 263, 264, 265, 266, 267, 268, 269, 270, 271, 272, 273, 274, 275, 276, 277, 278, 279, 280, 281, 282, 283, 284, 285, 286, 287 or 288 genomic regions, wherein each of said genomic regions is distinct and identified by sequence comparison as corresponding to, or defined by, or defined in reference to, one of SEQ ID NO: 601 to 3472, as found in the human genome build Grch37/hg19, preferably wherein each of said genomic regions is distinct and identified by sequence comparison as corresponding to, or defined by, or defined in reference to, one of SEQ ID NO: 601 to 1768, as found in the human genome build Grch37/hg19, more preferably wherein each of said genomic regions is distinct and identified by sequence comparison as corresponding to, or defined by, or defined in reference to, one of SEQ ID NO: 601 to 1026, as found in the human genome build Grch37/hg19.

[0067] In one embodiment, the size of said set of genomic regions is adjusted depending of the predictive value of the specific genomic regions included to achieve the desired specificity and sensitivity of the method of the invention. It is within the reach of the skilled artisan to adjust the content (number of sequence and choice of sequences) of the set of genomic regions, for instance and without limitation using the absolute coefficient as illustrated in the example provided in the present application that are indicative of the predictive value of a given genomic region.

[0068] In one embodiment, the method of the invention comprises a step of measuring in a sample from the subject a plurality of loci-specific DNA methylation levels in a set of genomic regions, wherein said set of genomic regions comprises, or consists of, 2, 3, 4, 5, 6, 7, 8 or 9, preferably comprises or consists of 10 or 11, more preferably comprises or consists of, 12, 13, 14, 15, 16, 17, 18, 19, 20, 21, 22, 23, 24, 25, 26, 27, 28, 29, 30, 31, 32, 33, 34, 35, 36, 37, 38, 39, 40, 41, 42, 43, 44, 45, 46, 47, 48, 49, 50, 51, 52, 53, 54, 55, 56, 57, 58, 59, 60, 61, 62, 63, 64, 65, 66, 67, 68, 69, 70, 71, 72, 73, 74, 75, 76, 77, 78, 79, 80, 81, 82, 83, 84, 85, 86, 87, 88, 89, 90, 91, 92, 93, 94, 95, 96, 97, 98, 99, 100, 101, 102, 103, 104, 105, 106, 107, 108, 109, 110, 111, 112, 113, 114, 115, 116, 117, 118, 119, 120, 121, 122, 123, 124, 125, 126, 127, 128, 129, 130, 131, 132, 133, 134, 135, 136, 137, 138, 139, 140, 141, 142, 143 or 144 genomic regions, wherein each of said genomic regions is distinct and identified by sequence comparison as corresponding to, or defined by, or defined in reference to, one of SEQ ID NO: 601 to 744, as found in the human genome build Grch37/hg19.

[0069] In one embodiment, the method of the invention comprises a step of measuring in a sample from the subject a plurality of loci-specific DNA methylation levels in a set of genomic regions, wherein said set of genomic regions comprises, or consists of, 2, 3, 4, 5, 6, 7, 8 or 9, preferably comprises or consists of 10 or 11, more preferably comprises or consists of 12, 13, 14, 15, 16, 17, 18, 19, 20, 21, 22, 23, 24, 25, 26, 27, 28, 29, 30, 31, 32, 33, 34, 35, 36, 37, 38, 39, 40, 41, 42, 43, 44, 45, 46, 47, 48, 49, 50, 51 or 52 genomic regions, wherein each of said genomic regions is distinct and identified by sequence comparison as corresponding to, or defined by, or defined in reference to, one of SEQ ID NO: 601 to 652, as found in the human genome build Grch37/hg19.

[0070] In one embodiment, the method of the invention comprises a step of measuring in a sample from the subject a plurality of loci-specific DNA methylation levels in a set of genomic regions, wherein said set of genomic regions comprises, or consists of, 2, 3, 4, 5, 6, 7, 8 or 9, preferably comprises or consists of 10 genomic regions, wherein each of said genomic regions is distinct and identified by sequence comparison as corresponding to, or defined by, or defined in reference to, one of SEQ ID NO: 601 to 610, as found in the human genome build Grch37/hg19.

[0071] In one embodiment, the method of the invention comprises a step of measuring in a sample from the subject a plurality of loci-specific DNA methylation levels in a set of genomic regions, wherein said set of genomic regions comprises, or consists of, 2, 3, 4, 5, 6, 7, 8, 9 or 10, preferably comprises or consists of 11 genomic regions, wherein each of said genomic regions is distinct and identified by sequence comparison as corresponding to, or defined by, or defined in reference to, one of SEQ ID NO: 601 to 611, as found in the human genome build Grch37/hg19.

[0072] In one embodiment, the method of the invention comprises a step of measuring in a sample from the subject a plurality of loci-specific DNA methylation levels in a set of genomic regions, wherein said set of genomic regions comprises, or consists of, 2, 3, 4, 5, 6, 7, 8, 9, 10 or 11, preferably comprises or consists of 12 genomic regions, wherein each of said genomic regions is distinct and identified by sequence comparison as corresponding to, or defined by, or defined in reference to, one of SEQ ID NO: 601 to 612, as found in the human genome build Grch37/hg19.

[0073] In one embodiment, the method of the invention comprises a step of measuring in a sample from the subject a plurality of loci-specific DNA methylation levels in a set of genomic regions, wherein said set of genomic regions comprises, or consists of, 2, 3, 4, 5, 6, 7, 8, 9, 10, 11, 12, 13 or 14 preferably comprises or consists of 15 genomic regions, wherein each of said genomic regions is distinct and identified by sequence comparison as corresponding to, or defined by, or defined in reference to, one of SEQ ID NO: 601 to 615, as found in the human genome build Grch37/hg19.

[0074] In one embodiment, the method of the invention comprises a step of measuring in a sample from the subject a plurality of loci-specific DNA methylation levels in a set of genomic regions, wherein said set of genomic regions comprises, or consists of, 2, 3, 4, 5, 6, 7, 8, 9, 10, 11, 12, 13, 14, 15, 16, 17, 18, 19, 20, 21, 22, 23, 24, 25, 26, 27 or 28, preferably comprises or consists of 29 genomic regions, wherein each of said genomic regions is distinct and identified by sequence comparison as corresponding to, or defined by, or defined in reference to, one of SEQ ID NO: 601 to 629, as found in the human genome build Grch37/hg19.

[0075] In one embodiment, the method of the invention comprises a step of measuring in a sample from the subject a plurality of loci-specific DNA methylation levels in a set of genomic regions, wherein said set of genomic regions comprises, or consists of, 2, 3, 4, 5, 6, 7, 8, 9, 10, 11, 12, 13, 14, 15, 16, 17, 18, 19, 20, 21, 22, 23, 24, 25, 26, 27, 28, 29, 30, 31, 32, 33, 34, 35, 36, 37, 38, 39, 40, 41, 42, 43, 44, 45, 46, 47, 48, 49, 50, 51, 52, 53, 54, 55, 56, 57, 58, 59, 60, 61, 62, 63, 64, 65, 66, 67, 68, 69, 70, 71, 72, 73, 74, 75, 76, 77, 78, 79, 80, 81, 82, 83, 84, 85, 86, 87, 88, 89, 90, 91, 92, 93, 94, 95, 96, 97, 98, 99, 100, 101, 102, 103, 104, 105, 106, 107, 108, 109, 110, 111, 112, 113, 114, 115, 116, 117, 118, 119, 120, 121, 122, 123, 124, 125, 126, 127, 128, 129, 130, 131, 132, 133, 134, 135, 136, 137, 138, 139, 140, 141, 142, 143, 144, 145, 146, 147, 148, 149, 150, 151, 152, 153, 154, 155, 156, 157, 158, 159, 160, 161, 162, 163, 164, 165, 166, 167, 168, 169, 170, 171, 172, 173, 174, 175, 176, 177, 178, 179, 180, 181, 182, 183, 184, 185, 186, 187, 188, 189, 190, 191, 192, 193, 194, 195, 196, 197, 198 or 199, preferably comprises or consists of, 200, 201, 202, 203, 204, 205, 206, 207, 208, 209, 210, 211, 212, 213, 214, 215, 216, 217, 218, 219, 220, 221, 222, 223, 224, 225, 226, 227, 228, 229, 230, 231, 232, 233, 234, 235, 236, 237, 238, 239, 240, 241, 242, 243, 244, 245, 246, 247, 248, 249, 250, 251, 252, 253, 254, 255, 256, 257, 258, 259, 260, 261, 262, 263, 264, 265, 266, 267, 268, 269, 270, 271, 272, 273, 274, 275, 276, 277, 278, 279, 280, 281, 282, 283, 284, 285, 286, 287, 288, 289, 290, 291, 292, 293, 294, 295, 296, 297, 298, 299, 300, 301, 302, 303, 304, 305, 306, 307, 308, 309, 310, 311, 312, 313, 314, 315, 316, 317, 318, 319, 320, 321, 322, 323, 324, 325, 326, 327, 328, 329, 330, 331, 332, 333, 334, 335, 336, 337, 338, 339, 340, 341, 342, 343, 344, 345, 346, 347, 348, 349, 350, 351, 352, 353, 354, 355, 356, 357, 358, 359, 360, 361, 362, 363, 364, 365, 366, 367, 368, 369, 370, 371, 372, 373, 374, 375, 376, 377, 378, 379, 380, 381, 382, 383, 384, 385, 386, 387, 388, 389, 390, 391, 392, 393, 394, 395, 396, 397, 398, 399, 400, 401, 402, 403, 404, 405, 406, 407, 408, 409, 410, 411, 412, 413, 414, 415, 416, 417, 418, 419, 420, 421, 422, 423, 424, 425, 426, 427, 428, 429, 430, 431, 432, 433, 434, 435, 436, 437, 438, 439, 440, 441, 442, 443, 444, 445, 446, 447, 448, 449, 450, 451, 452, 453, 454, 455, 456, 457, 458, 459, 460, 461, 462, 463, 464, 465, 466, 467, 468, 469, 470, 471, 472, 473, 474, 475, 476, 477, 478, 479, 480, 481, 482, 483, 484, 485, 486, 487, 488, 489, 490, 491, 492, 493, 494, 495, 496, 497, 498, 499, 500, 501, 502, 503, 504, 505, 506, 507, 508, 509, 510, 511, 512, 513, 514, 515, 516, 517, 518, 519, 520, 521, 522, 523, 524, 525, 526, 527, 528, 529, 530, 531, 532, 533, 534, 535, 536, 537, 538, 539, 540, 541, 542, 543, 544, 545, 546, 547, 548, 549, 550, 551, 552, 553, 554, 555, 556, 557, 558, 559, 560, 561, 562, 563, 564, 565, 566, 567, 568, 569, 570, 571, 572, 573, 574, 575, 576, 577, 578, 579, 580, 581, 582, 583, 584, 585, 586, 587, 588, 589, 590, 591, 592, 593, 594, 595, 596, 597, 598, 599 or 600 genomic regions, wherein each of said genomics regions consists of, a sequence having at least 90%, 91%, 92%, 93% or 94%, preferably having at least 95%, 96%, 97%, or 98%, more preferably having at least 99% sequence identity with one distinct sequence selected from the group consisting of SEQ ID NO: 1 to 600. In one embodiment, each of said genomics regions consists of one sequence selected from the group consisting of SEQ ID NO: 1 to 600.

[0076] In one embodiment, the method of the invention comprises a step of measuring in a sample from the subject a plurality of loci-specific DNA methylation levels in a set of genomic regions, wherein said set of genomic regions comprises, or consists of, 2, 3, 4, 5, 6, 7, 8, or 9, preferably comprises or consists of 10, 11, more preferably comprises or consists of 12, 13, 14, 15, 16, 17, 18, 19, 20, 21, 22, 23, 24, 25, 26, 27, 28, 29, 30, 31, 32, 33, 34, 35, 36, 37, 38, 39, 40, 41, 42, 43, 44, 45, 46, 47, 48, 49, 50, 51, 52, 53, 54, 55, 56, 57, 58, 59, 60, 61, 62, 63, 64, 65, 66, 67, 68, 69, 70, 71, 72, 73, 74, 75, 76, 77, 78, 79, 80, 81, 82, 83, 84, 85, 86, 87, 88, 89, 90, 91, 92, 93, 94, 95, 96, 97, 98, 99, 100, 101, 102, 103, 104, 105, 106, 107, 108, 109, 110, 111, 112, 113, 114, 115, 116, 117, 118, 119, 120, 121, 122, 123, 124, 125, 126, 127, 128, 129, 130, 131, 132, 133, 134, 135, 136, 137, 138, 139, 140, 141, 142, 143, 144, 145, 146, 147, 148, 149, 150, 151, 152, 153, 154, 155, 156, 157, 158, 159, 160, 161, 162, 163, 164, 165, 166, 167, 168, 169, 170, 171, 172, 173, 174, 175, 176, 177, 178, 179, 180, 181, 182, 183, 184, 185, 186, 187, 188, 189, 190, 191, 192, 193, 194, 195, 196, 197, 198 199, 200, 201, 202, 203, 204, 205, 206, 207, 208, 209, 210, 211, 212, 213, 214, 215, 216, 217, 218, 219, 220, 221, 222, 223, 224, 225, 226, 227, 228, 229, 230, 231, 232, 233, 234, 235, 236, 237, 238, 239, 240, 241, 242, 243, 244, 245, 246, 247, 248, 249, 250, 251, 252, 253, 254, 255, 256, 257, 258, 259, 260, 261, 262, 263, 264, 265, 266, 267, 268, 269, 270, 271, 272, 273, 274, 275, 276, 277, 278, 279, 280, 281, 282, 283, 284, 285, 286, 287 or 288 genomic regions, wherein each of said genomic regions consists of a sequence having at least 90%, 91%, 92%, 93%, 94%, 95%, 96%, 97%, 98% or at least 99% sequence identity with one distinct sequence selected from the group consisting of SEQ ID NO: 601 to 3472, preferably wherein each of said genomic regions consists of a sequence having at least 90%, 91%, 92%, 93%, 94%, 95%, 96%, 97%, 98% or at least 99% sequence identity with one distinct sequence selected from the group consisting of SEQ ID NO: 601 to 1768, more preferably wherein each of said genomic regions consists of a sequence having at least 90%, 91%, 92%, 93%, 94%, 95%, 96%, 97%, 98% or at least 99% sequence identity with one distinct sequence selected from the group consisting of SEQ ID NO: 601 to 1026.

[0077] In one embodiment, the method of the invention comprises a step of measuring in a sample from the subject a plurality of loci-specific DNA methylation levels in a set of genomic regions, wherein said set of genomic regions comprises, or consists of, 2, 3, 4, 5, 6, 7, 8 or 9, preferably comprises or consists of 10 or 11, more preferably comprises or consists of, 12, 13, 14, 15, 16, 17, 18, 19, 20, 21, 22, 23, 24, 25, 26, 27, 28, 29, 30, 31, 32, 33, 34, 35, 36, 37, 38, 39, 40, 41, 42, 43, 44, 45, 46, 47, 48, 49, 50, 51, 52, 53, 54, 55, 56, 57, 58, 59, 60, 61, 62, 63, 64, 65, 66, 67, 68, 69, 70, 71, 72, 73, 74, 75, 76, 77, 78, 79, 80, 81, 82, 83, 84, 85, 86, 87, 88, 89, 90, 91, 92, 93, 94, 95, 96, 97, 98, 99, 100, 101, 102, 103, 104, 105, 106, 107, 108, 109, 110, 111, 112, 113, 114, 115, 116, 117, 118, 119, 120, 121, 122, 123, 124, 125, 126, 127, 128, 129, 130, 131, 132, 133, 134, 135, 136, 137, 138, 139, 140, 141, 142, 143 or 144 genomic regions, wherein each of said genomic regions consists of a sequence having at least 90%, 91%, 92%, 93%, 94%, 95%, 96%, 97%, 98% or at least 99% sequence identity with one distinct sequence selected from the group consisting of SEQ ID NO: 601 to 744.

[0078] In one embodiment, the method of the invention comprises a step of measuring in a sample from the subject a plurality of loci-specific DNA methylation levels in a set of genomic regions, wherein said set of genomic regions comprises, or consists of, 2, 3, 4, 5, 6, 7, 8 or 9, preferably comprises or consists of 10 or 11, more preferably comprises or consists of 12, 13, 14, 15, 16, 17, 18, 19, 20, 21, 22, 23, 24, 25, 26, 27, 28, 29, 30, 31, 32, 33, 34, 35, 36, 37, 38, 39, 40, 41, 42, 43, 44, 45, 46, 47, 48, 49, 50, 51 or 52 genomic regions, wherein each of said genomic regions consists of a sequence having at least 90%, 91%, 92%, 93%, 94%, 95%, 96%, 97%, 98% or at least 99% sequence identity with one distinct sequence selected from the group consisting of SEQ ID NO: 601 to 652.

[0079] In one embodiment, the method of the invention comprises a step of measuring in a sample from the subject a plurality of loci-specific DNA methylation levels in a set of genomic regions, wherein said set of genomic regions comprises, or consists of, 2, 3, 4, 5, 6, 7, 8 or 9, preferably comprises or consists of 10 genomic regions, wherein each of said genomic regions consists of a sequence having at least 90%, 91%, 92%, 93%, 94%, 95%, 96%, 97%, 98% or at least 99% sequence identity with one distinct sequence selected from the group consisting of SEQ ID NO: 601 to 610.

[0080] In one embodiment, the method of the invention comprises a step of measuring in a sample from the subject a plurality of loci-specific DNA methylation levels in a set of genomic regions, wherein said set of genomic regions comprises, or consists of, 2, 3, 4, 5, 6, 7, 8, 9 or 10, preferably comprises or consists of 11 genomic regions, wherein each of said genomic regions consists of a sequence having at least 90%, 91%, 92%, 93%, 94%, 95%, 96%, 97%, 98% or at least 99% sequence identity with one distinct sequence selected from the group consisting of SEQ ID NO: 601 to 611.

[0081] In one embodiment, the method of the invention comprises a step of measuring in a sample from the subject a plurality of loci-specific DNA methylation levels in a set of genomic regions, wherein said set of genomic regions comprises, or consists of, 2, 3, 4, 5, 6, 7, 8, 9, 10 or 11, preferably comprises or consists of 12 genomic regions, wherein each of said genomic regions consists of a sequence having at least 90%, 91%, 92%, 93%, 94%, 95%, 96%, 97%, 98% or at least 99% sequence identity with one distinct sequence selected from the group consisting of SEQ ID NO: 601 to 612.

[0082] In one embodiment, the method of the invention comprises a step of measuring in a sample from the subject a plurality of loci-specific DNA methylation levels in a set of genomic regions, wherein said set of genomic regions comprises, or consists of, 2, 3, 4, 5, 6, 7, 8, 9, 10, 11, 12, 13 or 14 preferably comprises or consists of 15 genomic regions, wherein each of said genomic regions consists of a sequence having at least 90%, 91%, 92%, 93%, 94%, 95%, 96%, 97%, 98% or at least 99% sequence identity with one distinct sequence selected from the group consisting of SEQ ID NO: 601 to 615.

[0083] In one embodiment, the method of the invention comprises a step of measuring in a sample from the subject a plurality of loci-specific DNA methylation levels in a set of genomic regions, wherein said set of genomic regions comprises, or consists of, 2, 3, 4, 5, 6, 7, 8, 9, 10, 11, 12, 13, 14, 15, 16, 17, 18, 19, 20, 21, 22, 23, 24, 25, 26, 27 or 28, preferably comprises or consists of 29 genomic regions, wherein each of said genomic regions consists of, a sequence having at least 90%, 91%, 92%, 93%, 94%, 95%, 96%, 97%, 98% or at least 99% sequence identity with one distinct sequence selected from the group consisting of SEQ ID NO: 601 to 629.

[0084] In one embodiment, the method of the invention comprises a step of measuring in a sample from the subject a plurality of loci-specific DNA methylation levels in a set of genomic regions, wherein said set of genomic regions comprises, or consists of, 2, 3, 4, 5, 6, 7, 8, 9, 10, 11, 12, 13, 14, 15, 16, 17, 18, 19, 20, 21, 22, 23, 24, 25, 26, 27, 28, 29, 30, 31, 32, 33, 34, 35, 36, 37, 38, 39, 40, 41, 42, 43, 44, 45, 46, 47, 48, 49, 50, 51, 52, 53, 54, 55, 56, 57, 58, 59, 60, 61, 62, 63, 64, 65, 66, 67, 68, 69, 70, 71, 72, 73, 74, 75, 76, 77, 78, 79, 80, 81, 82, 83, 84, 85, 86, 87, 88, 89, 90, 91, 92, 93, 94, 95, 96, 97, 98, 99, 100, 101, 102, 103, 104, 105, 106, 107, 108, 109, 110, 111, 112, 113, 114, 115, 116, 117, 118, 119, 120, 121, 122, 123, 124, 125, 126, 127, 128, 129, 130, 131, 132, 133, 134, 135, 136, 137, 138, 139, 140, 141, 142, 143, 144, 145, 146, 147, 148, 149, 150, 151, 152, 153, 154, 155, 156, 157, 158, 159, 160, 161, 162, 163, 164, 165, 166, 167, 168, 169, 170, 171, 172, 173, 174, 175, 176, 177, 178, 179, 180, 181, 182, 183, 184, 185, 186, 187, 188, 189, 190, 191, 192, 193, 194, 195, 196, 197, 198 or 199, preferably comprises, or consists of, 200 genomic regions, wherein each of said genomic regions is distinct and identified by sequence comparison as corresponding to, or defined by, or defined in reference to, one of SEQ ID NO: 1 to 200, as found in the human genome build Grch37/hg19.

[0085] In one embodiment, the method of the invention comprises a step of measuring in a sample from the subject a plurality of loci-specific DNA methylation levels in a set of genomic regions, wherein said set of genomic regions comprises, or consists of, 2, 3, 4, 5, 6, 7, 8, 9, 10, 11, 12, 13, 14, 15, 16, 17, 18, 19, 20, 21, 22, 23, 24, 25, 26, 27, 28, 29, 30, 31, 32, 33, 34, 35, 36, 37, 38, 39, 40, 41, 42, 43, 44, 45, 46, 47, 48, 49, 50, 51, 52, 53, 54, 55, 56, 57, 58, 59, 60, 61, 62, 63, 64, 65, 66, 67, 68, 69, 70, 71, 72, 73, 74, 75, 76, 77, 78, 79, 80, 81, 82, 83, 84, 85, 86, 87, 88, 89, 90, 91, 92, 93, 94, 95, 96, 97, 98, 99, 100, 101, 102, 103, 104, 105, 106, 107, 108, 109, 110, 111, 112, 113, 114, 115, 116, 117, 118, 119, 120, 121, 122, 123, 124, 125, 126, 127, 128, 129, 130, 131, 132, 133, 134, 135, 136, 137, 138, 139, 140, 141, 142, 143, 144, 145, 146, 147, 148, 149, 150, 151, 152, 153, 154, 155, 156, 157, 158, 159, 160, 161, 162, 163, 164, 165, 166, 167, 168, 169, 170, 171, 172, 173, 174, 175, 176, 177, 178, 179, 180, 181, 182, 183, 184, 185, 186, 187, 188, 189, 190, 191, 192, 193, 194, 195, 196, 197, 198 or 199, preferably comprises, or consists of, 200 genomic regions, wherein each of said genomics region consists of a sequence having at least 90%, 91%, 92%, 93% or 94%, preferably having at least 95%, 96%, 97%, or 98%, more preferably having at least 99% sequence identity with one distinct sequence selected from the group consisting of SEQ ID NO: 1 to 200. In one embodiment, each of said genomics regions consists of one sequence selected from the group consisting of SEQ ID NO: 1 to 200.

[0086] In one embodiment, the method of the invention comprises a step of deriving from the measure in a sample from the subject at least one, or a plurality of, loci-specific DNA methylation level(s), a DNA methylation profile for the subject. In one embodiment, the method of the invention comprises a step of deriving from the measure in a sample from the subject of at least one, or a plurality of loci-specific DNA methylation levels, a DNA methylation profile for the subject.

[0087] As used herein, the term DNA methylation profile refers to a set of data representing the level of DNA methylation of one or more loci for a given subject in a form suitable for comparison purposes. It is within the reach of the skilled artisan to select the most appropriate data set representation, such as for example and without limitation, raw values, means, medians, or any form of mathematical or graphical representation. The profile may indicate the methylation level of every loci in a subject, can have information regarding a subset of the loci in a genome, or can have information regarding regional methylation density. When deriving methylation profile for a subject it is for example and without limitation, possible to define the methylation level of a given region of interest as the ratio of methylated position (for example and without limitation, methylated cytosine or methylated cytosine in a CpG context) relative to the total of position that can be methylated in said region of interest (for example, and without limitation, the total number of cytosine, or cytosine in a CpG context, in said region of interest). When deriving the methylation profile for a subject is may also be possible to select the measurements to be included in the profile, for instance, and without limitation, it is possible to select the measurements based on the quality of the measure and/or their information content as illustrated in the example section.

[0088] In one embodiment, the method of the invention comprises a step of comparing the methylation profile of the subject to one or more reference methylation profile(s).

[0089] As used herein the term reference DNA methylation profile refers to a DNA methylation profile for a given control subject, or for a given population of control subjects, of known outcome in respect to the development of preeclampsia. The terms “control subject” is used herein to refer to a subject of know outcome in respect to preeclampsia that is used to derive a reference DNA methylation profile. It is within the reach of the skilled artisan to select for the reference DNA methylation profile the most appropriate data set representation, such as for example and without limitation, raw values, means, medians, or any form of mathematical or graphical representation. When deriving the reference methylation profile for a control subject or, preferably for a population of control subjects, it is for example, and without limitation, possible to use the level of DNA methylation of one or more loci for a given control subject, or for a given population of control subjects, of known outcome in respect to the development of preeclampsia to build a graphical representation and/or a mathematical model of said control subject or population of control subjects.

[0090] Such a model may be for instance, and without limitation, a hierarchical clustering analysis, a generalized linear or logistic model, a LASSO model, an elastic net regularized generalized linear or logistic model, a Tikhonov regularization model and the like. It is to be understood in the context of the comparison step of the invention, that the reference DNA methylation profile comprise information on the level of methylation of the same one or more loci that are considered in the measuring step. Therefore, embodiment relating to the loci or plurality thereof considered in the measuring step may apply to the determination of the reference DNA methylation profile.

[0091] In one embodiment, the reference DNA methylation profile corresponds to a risk of preeclampsia group. It is to be understood in the context of the invention that risk of preeclampsia group is used in respect to a reference DNA methylation profile to indicate that, the similarity, or dissimilarity, to said reference DNA methylation is indicative of the level of risk, such as for instance and without limitation, the probability, of developing preeclampsia at later stage of pregnancy. It is within the reach of the skilled artisan to define the risk groups, depending on parameters such as for instance, and without limitation, the targeted sensitivity or specificity or the number of groups to be defined.

[0092] In one embodiment, the reference DNA methylation profile corresponds to a high risk of preeclampsia group. In one embodiment, said high risk of developing preeclampsia correspond to a probability of developing preeclampsia above the probability corresponding to the incidence of preeclampsia of the population, preferably of the population relevant to the tested subject considered. In one embodiment, said high risk of developing preeclampsia correspond to a probability of developing preeclampsia above 0.04, preferably above 0.05, 0.06, 0.07, 0.08, 0.09, 0.1, 0.11, 0.12, 0.13, 0.14, 0.2, 0.3, 0.4, 0.5, 0.6, 0.7, 0.8, 0.9 or above.

[0093] In one embodiment, the reference DNA methylation profile corresponds to a low risk of preeclampsia group. In one embodiment, said low risk of developing preeclampsia correspond to a probability of developing preeclampsia below one minus the probability corresponding to the incidence of preeclampsia of the population, preferably of the population relevant to the tested subject considered. In one embodiment, said low risk of developing preeclampsia correspond to a probability of developing preeclampsia below 0.96, preferably below 0.95, 0.94, 0.93, 0.92, 0.91, 0.9, 0.89, 0.88 0.87, 0.86, 0.8, 0.7, 0.6, 0.5, 0.4, 0.3, 0.2, 0.1 or below.

[0094] In one embodiment, the reference DNA methylation profile is derived from the measure of a plurality of loci-specific DNA methylation levels in control subjects that developed preeclampsia at later stage of pregnancy. In one embodiment, the reference DNA methylation profile corresponding to a high risk of preeclampsia group is derived from the measure of a plurality of loci-specific DNA methylation levels in control subjects that developed preeclampsia at later stage of pregnancy.

[0095] In one embodiment, the reference DNA methylation profile is derived from the measure of a plurality of loci-specific DNA methylation levels in control subjects that remained healthy in respect to preeclampsia during their pregnancy. In one embodiment, the reference DNA methylation profile corresponding to a low risk of preeclampsia group is derived from the measure of a plurality of loci-specific DNA methylation levels in control subjects that remained healthy in respect to preeclampsia during their pregnancy.

[0096] It is within the reach of the skilled artisan to select the control subject(s) to be considered in order to determine a reference DNA methylation profile. For instance, and without limitation, the skilled artisan is able to account for factors influencing the risk of developing preeclampsia such as for instance Body Mass Index, parity and the like. Likewise, the skilled artisan is able to select the appropriate gestational age at the time of sampling the control subject to be included in the reference, matching that of the subject whose methylation profile will be compared to the reference methylation profile (age-matched control subject(s)).

[0097] In one embodiment, the reference DNA methylation profile is derived from the measure of a plurality of loci-specific DNA methylation levels in aged-matched control subjects that developed preeclampsia at later stage of pregnancy. In one embodiment, the reference DNA methylation profile corresponding to a high risk of preeclampsia group is derived from the measure of a plurality of loci-specific DNA methylation levels in aged-matched control subjects that developed preeclampsia at later stage of pregnancy.

[0098] In one embodiment, the reference DNA methylation profile is derived from the measure of a plurality of loci-specific DNA methylation levels in aged-matched control subjects that remained healthy in respect to preeclampsia during their pregnancy. In one embodiment, the reference DNA methylation profile corresponding to a low risk of preeclampsia group is derived from the measure of a plurality of loci-specific DNA methylation levels in aged-matched control subjects that remained healthy in respect to preeclampsia during their pregnancy.

[0099] In one embodiment, the method of the invention comprises a step of comparing the methylation profile of the subject to,
[0100] i. a reference DNA methylation profile corresponding to a high risk of preeclampsia group; and/or,
[0101] ii. a reference DNA methylation profile corresponding to a low risk of preeclampsia group.

[0102] In one embodiment, the method of the invention comprises a step of comparing the methylation profile of the subject to,
[0103] i. a reference DNA methylation profile corresponding to a high risk of preeclampsia group, wherein said reference DNA methylation profile corresponding to a high risk of preeclampsia group is derived from the measure of the plurality of loci-specific DNA methylation levels in control subjects, preferably gestational age-matched control subjects, that developed preeclampsia at later stage of pregnancy; and/or,
[0104] ii. a reference DNA methylation profile corresponding to a low risk of preeclampsia group, wherein said reference DNA methylation profile corresponding to a low risk of preeclampsia group is derived from the measure of the plurality of loci-specific DNA methylation levels in control subjects, preferably gestational age-matched control subjects, that remained healthy in respect to preeclampsia during their pregnancy.

[0105] In one embodiment, the method of the invention comprises a step of assigning the subject to a preeclampsia risk group. The assignment results in, the stratification of the subject for her preeclampsia risk, in the evaluation of the risk of developing preeclampsia in the subject, in the prognosis of preeclampsia in the subject and/or in the prediction of the risk of developing preeclampsia in the subject. In one embodiment, the method of the invention comprises a step of assigning the subject to a preeclampsia risk group, thereby predicting the risk of developing preeclampsia in said subject

[0106] In one embodiment, the DNA methylation profile of the subject is not different from, preferably not statistically different from, a reference DNA methylation profile corresponding to a high risk of preeclampsia group and said subject is assigned to said high risk of preeclampsia group and/or the DNA methylation profile is different from, preferably statistically different from, a reference DNA methylation profile corresponding to low risk of preeclampsia group(s) and the subject is assigned to a high risk of preeclampsia group.

[0107] In one embodiment, the DNA methylation profile of the subject is not different from, preferably not statistically different from, a reference DNA methylation profile corresponding to a low risk of preeclampsia group and said subject is assigned to said low risk of preeclampsia group and/or the DNA methylation profile is different from, preferably statistically different from, a reference DNA methylation profile corresponding to high risk of preeclampsia group(s) and the subject is assigned to a low risk of preeclampsia group.

[0108] In the context of the invention, difference between the subject DNA methylation profile and the reference methylation profile arise from the lower methylation level (hypomethylation) or higher (hypermethylation) of certain loci and/or region in the subject when compared with the reference methylation profile.

[0109] In one embodiment, the method of the invention comprises a step of providing a sample from the subject.

[0110] In one embodiment, the sample was previously taken form the subject. The method of the invention does not comprise a step of collecting the sample from the subject. in this embodiment, the method of the invention is an in vitro method.

[0111] In one embodiment, the sample is a tissue sample or a bodily fluid.

[0112] Examples of bodily fluid that may be considered in the context of the invention include, without being limited to, blood, plasma, serum, urine, cervical smears, fluids and aspirates and amniotic fluid.

[0113] Example of tissue sample that may be considered in the context of the invention include, without being limited to chorionic villus biopsy, cervical biopsy, fetus-derived tissue biopsy and endometrial tissue.

[0114] In one embodiment the sample is a bodily fluid. In one embodiment, the sample is a blood sample, a serum sample, a plasma sample or an amniotic fluid sample. In one embodiment, the sample is a blood, serum or plasma sample. In one embodiment, the sample is maternal or uteroplacental blood, serum or plasma sample. In one embodiment, the sample is a blood sample, preferably a plasma sample. In one embodiment, the sample is a maternal or uteroplacental blood sample, preferably a maternal or uteroplacental plasma sample.

[0115] In one embodiment, the sample a contain cell-free DNA. In one embodiment, the sample is a bodily fluid and contains cell-free DNA. In one embodiment, the sample is blood, plasma or serum sample and contain circulating cell-free DNA (cfDNA). In one embodiment, the sample is maternal or uteroplacental blood, serum or plasma sample and contains circulating cell-free DNA (cfDNA).

[0116] It is to be understood that embodiment contained in the application may be combined in the methods of the invention.

[0117] In one embodiment, the method of the invention is a method for the prediction, preferably presymptomatic prediction, of the risk of developing preeclampsia in a human subject comprising the steps of:
[0118] a. measuring in a sample from said subject at least one, or a plurality of, loci-specific DNA methylation level(s);
[0119] b. deriving from said measurement a DNA methylation profile for said subject;
[0120] c. comparing said DNA methylation profile to at least one reference DNA methylation profile corresponding to a risk group; and,
[0121] d. assigning on the basis of said comparison said subject to said at least one preeclampsia risk group, thereby predicting the risk of developing preeclampsia in said subject.

[0122] In one embodiment, the method of the invention is a method for the prediction, preferably presymptomatic prediction, of the risk of developing preeclampsia in a human subject, wherein said subject's gestational age is under 140 days, comprising the steps of:
[0123] a. measuring in a sample from said subject at least one, or a plurality of, loci-specific DNA methylation levels;
[0124] b. deriving from said measurement a DNA methylation profile for said subject;
[0125] c. comparing said DNA methylation profile to at least one reference DNA methylation profile corresponding to a risk group; and,
[0126] d. assigning on the basis of said comparison said subject to said at least one preeclampsia risk group, thereby predicting the risk of developing preeclampsia in said subject.

[0127] In one embodiment, the method of the invention is a method for the prediction, preferably presymptomatic prediction, of the risk of developing preeclampsia in a human subject, wherein said subject's gestational age is under 140 days, comprising the steps of:
[0128] a. measuring in a sample from said subject a plurality of loci-specific DNA methylation levels;
[0129] b. deriving from said measurement a DNA methylation profile for said subject;
[0130] c. comparing said DNA methylation profile to,
   [0131] i. a reference DNA methylation profile corresponding to a high risk of preeclampsia group; and/or,
   [0132] ii. a reference DNA methylation profile corresponding to a low risk of preeclampsia group; and,
[0133] d. assigning on the basis of said comparison said subject to a preeclampsia risk group, thereby predicting the risk of developing preeclampsia in said subject.

[0134] In one embodiment, the method of the invention further comprises a step of extracting DNA from the sample, preferably extracting genomic DNA from the sample. This step is performed of before the step of measuring in a sample from said subject a plurality of loci-specific DNA methylation levels. It is within the reach of the skilled artisan to select the appropriate DNA extraction methods depending, for example and without limitation on the nature of the sample and/or the subsequent method used to measure the plurality of loci-specific DNA methylation levels.

[0135] In one embodiment, the method of the invention further comprises a step of performing target enrichment of one or a plurality of specific genomic region. This step is performed before the step of measuring in a sample from said subject a plurality of loci-specific DNA methylation levels and after the step of extracting DNA from the sample. The target enrichment step may be useful for instance when the measuring step is directed to specific genomic regions. The skilled artisan is familiar with techniques allowing target enrichment in a DNA sample. Target enrichment may be for instance, and without limitation, be implemented using capture probes as described in the example section.

[0136] The present invention also relates to a kit for implementing the method of the invention.

[0137] In one embodiment, the kit of the invention comprises a set of capture probe.

[0138] As used herein, the term capture probes correspond to oligonucleotides that hybridize specifically with a specific genomic region (whether or not it is bisulfite-converted), and that are modified to perform target enrichment on a genomic DNA sample and that may be used may be used to implement the method of the invention. Example of modification include, for instance and without limitation, the addition of a binding site on the oligonucleotide allowing the direct or indirect capture on a solid substrate of the oligonucleotide hybridized to a specific genomic DNA region. Such modification may be for instance, and without limitation, be implemented and used as described in the example section. With the knowledge of the DNA sequence of the targeted genomic region, it is within the reach of the skilled artisan to design capture probes.

[0139] In one embodiment, the kit of the invention comprise a set of capture probe, wherein said set of capture probe consist of capture probes specific for at least 2 genomic DNA regions, wherein each of said at least two genomic regions is distinct and identified by sequence comparison as corresponding to, or defined by, or defined in reference to, one of SEQ ID NO: 1 to 600, as found in the human genome build Grch37/hg19, preferably identified by sequence comparison as corresponding to, or defined by, or defined in reference to, one of SEQ ID NO: 1 to 200, as found in the human genome build Grch37/hg19.

[0140] In one embodiment, the kit of the invention comprise a set of capture probes, wherein said set of capture probes consist of capture probes specific for at least 10 genomic regions, wherein each of said at least 10 genomic regions is distinct and identified by sequence comparison as corresponding to, or defined by, or defined in reference to, one of SEQ ID NO: 601 to 3472, as found in the human genome build Grch37/hg19, preferably identified by sequence comparison as corresponding to, or defined by, or defined in reference to, one of SEQ ID NO: 601 to 610, as found in the human genome build Grch37/hg19.

[0141] In one embodiment, the kit of the invention comprise a set of capture probe, wherein said set of capture probe consist of capture probes specific for at least two genomic DNA regions wherein each of said at least two genomics regions consists of, a sequence having at least 90%, 91%, 92%, 93% or 94%, preferably having at least 95%, 96%, 97%, or 98%, more preferably having at least 99% sequence identity with one distinct sequence selected from the group consisting of SEQ ID NO: 1 to 600. In one embodiment, each of said at least two genomics regions consists of one sequence selected from the group consisting of SEQ ID NO: 1 to 600.

[0142] In one embodiment, the kit of the invention comprise a set of capture probes, wherein said set of capture probes consist of capture probes specific for at least 10 genomic regions wherein each of said at least 10 genomics regions consists of, a sequence having at least 90%, 91%, 92%, 93% or 94%, preferably having at least 95%, 96%, 97%, or 98%, more preferably having at least 99% sequence identity with one distinct sequence selected from the group consisting of SEQ ID NO: 601 to 3472. In one embodiment, each of said at least 10 genomics regions consists of one sequence selected from the group consisting of SEQ ID NO: 601 to 610.

[0143] In one embodiment, the kit of the invention comprise a set of capture probe, wherein said set of capture probe consists of capture probes specific for 2, 3, 4, 5, 6, 7, 8, 9, 10, 11, 12, 13, 14, 15, 16, 17, 18, 19, 20, 21, 22, 23, 24, 25, 26, 27, 28, 29, 30, 31, 32, 33, 34, 35, 36, 37, 38, 39, 40, 41, 42, 43, 44, 45, 46, 47, 48, 49, 50, 51, 52, 53, 54, 55, 56, 57, 58, 59, 60, 61, 62, 63, 64, 65, 66, 67, 68, 69, 70, 71, 72, 73, 74, 75, 76, 77, 78, 79, 80, 81, 82, 83, 84, 85, 86, 87, 88, 89, 90, 91, 92, 93, 94, 95, 96, 97, 98, 99, 100, 101, 102, 103, 104, 105, 106, 107, 108, 109, 110, 111, 112, 113, 114, 115, 116, 117, 118, 119, 120, 121, 122, 123, 124, 125, 126, 127, 128, 129, 130, 131, 132, 133, 134, 135, 136, 137, 138, 139, 140, 141, 142, 143, 144, 145, 146, 147, 148, 149, 150, 151, 152, 153, 154, 155, 156, 157, 158, 159, 160, 161, 162, 163, 164, 165, 166, 167, 168, 169, 170, 171, 172, 173, 174, 175, 176, 177, 178, 179, 180, 181, 182, 183, 184, 185, 186, 187, 188, 189, 190, 191, 192, 193, 194, 195, 196, 197, 198 or 199, preferably 200, 201, 202, 203, 204, 205, 206, 207, 208, 209, 210, 211, 212, 213, 214, 215, 216, 217, 218, 219, 220, 221, 222, 223, 224, 225, 226, 227, 228, 229, 230, 231, 232, 233, 234, 235, 236, 237, 238, 239, 240, 241, 242, 243, 244, 245, 246, 247, 248, 249, 250, 251, 252, 253, 254, 255, 256, 257, 258, 259, 260, 261, 262, 263, 264, 265, 266, 267, 268, 269, 270, 271, 272, 273, 274, 275, 276, 277, 278, 279, 280, 281, 282, 283, 284, 285, 286, 287, 288, 289, 290, 291, 292, 293, 294, 295, 296, 297, 298, 299, 300, 301, 302, 303, 304, 305, 306, 307, 308, 309, 310, 311, 312, 313, 314, 315, 316, 317, 318, 319, 320, 321, 322, 323, 324, 325, 326, 327, 328, 329, 330, 331, 332, 333, 334, 335, 336, 337, 338, 339, 340, 341, 342, 343, 344, 345, 346, 347, 348, 349, 350, 351, 352, 353, 354, 355, 356, 357, 358, 359, 360, 361, 362, 363, 364, 365, 366, 367, 368, 369, 370, 371, 372, 373, 374, 375, 376, 377, 378, 379, 380, 381, 382, 383, 384, 385, 386, 387, 388, 389, 390, 391, 392, 393, 394, 395, 396, 397, 398, 399, 400, 401, 402, 403, 404, 405, 406, 407, 408, 409, 410, 411, 412, 413, 414, 415, 416, 417, 418, 419, 420, 421, 422, 423, 424, 425, 426, 427, 428, 429, 430, 431, 432, 433, 434, 435, 436, 437, 438, 439, 440, 441, 442, 443, 444, 445, 446, 447, 448, 449, 450, 451, 452, 453, 454, 455, 456, 457, 458, 459, 460, 461, 462, 463, 464, 465, 466, 467, 468, 469, 470, 471, 472, 473, 474, 475, 476, 477, 478, 479, 480, 481, 482, 483, 484, 485, 486, 487, 488, 489, 490, 491, 492, 493, 494, 495, 496, 497, 498, 499, 500, 501, 502, 503, 504, 505, 506, 507, 508, 509, 510, 511, 512, 513, 514, 515, 516, 517, 518, 519, 520, 521, 522, 523, 524, 525, 526, 527, 528, 529, 530, 531, 532, 533, 534, 535, 536, 537, 538, 539, 540, 541, 542, 543, 544, 545, 546, 547, 548, 549, 550, 551, 552, 553, 554, 555, 556, 557, 558, 559, 560, 561, 562, 563, 564, 565, 566, 567, 568, 569, 570, 571, 572, 573, 574, 575, 576, 577, 578, 579, 580, 581, 582, 583, 584, 585, 586, 587, 588, 589, 590, 591, 592, 593, 594, 595, 596, 597, 598, 599, or 600 genomic regions wherein each of said genomic regions is distinct and identified by sequence comparison as corresponding to, or defined by, or defined in reference to, one of SEQ ID NO: 1 to 600, as found in the human genome build Grch37/hg19.

[0144] In one embodiment, the kit of the invention comprise a set of capture probes, wherein said set of capture probe consists of capture probes specific for 10, 11, 12, 13, 14, 15, 16, 17, 18, 19, 20, 21, 22, 23, 24, 25, 26, 27, 28, 29, 30, 31, 32, 33, 34, 35, 36, 37, 38, 39, 40, 41, 42, 43, 44, 45, 46, 47, 48, 49, 50, 51, 52, 53, 54, 55, 56, 57, 58, 59, 60, 61, 62, 63, 64, 65, 66, 67, 68, 69, 70, 71, 72, 73, 74, 75, 76, 77, 78, 79, 80, 81, 82, 83, 84, 85, 86, 87, 88, 89, 90, 91, 92, 93, 94, 95, 96, 97, 98, 99, 100, 101, 102, 103, 104, 105, 106, 107, 108, 109, 110, 111, 112, 113, 114, 115, 116, 117, 118, 119, 120, 121, 122, 123, 124, 125, 126, 127, 128, 129, 130, 131, 132, 133, 134, 135, 136, 137, 138, 139, 140, 141, 142, 143, 144, 145, 146, 147, 148, 149, 150, 151, 152, 153, 154, 155, 156, 157, 158, 159, 160, 161, 162, 163, 164, 165, 166, 167, 168, 169, 170, 171, 172, 173, 174, 175, 176, 177, 178, 179, 180, 181, 182, 183, 184, 185, 186, 187, 188, 189, 190, 191, 192, 193, 194, 195, 196, 197, 198, 199, 200, 201, 202, 203, 204, 205, 206, 207, 208, 209, 210, 211, 212, 213, 214, 215, 216, 217, 218, 219, 220, 221, 222, 223, 224, 225, 226, 227, 228, 229, 230, 231, 232, 233, 234, 235, 236, 237, 238, 239, 240, 241, 242, 243, 244, 245, 246, 247, 248, 249, 250, 251, 252, 253, 254, 255, 256, 257, 258, 259, 260, 261, 262, 263, 264, 265, 266, 267, 268, 269, 270, 271, 272, 273, 274, 275, 276, 277, 278, 279, 280, 281, 282, 283, 284, 285, 286, 287 or 288 genomic regions wherein each of said genomic regions is distinct and identified by sequence comparison as corresponding to, or defined by, or defined in reference to, one of SEQ ID NO: 1 to 3472, as found in the human genome build Grch37/hg19. In one embodiment, each of said genomic regions is distinct and identified by sequence comparison as corresponding to, or defined by, or defined in reference to, one of SEQ ID NO: 1 to 1768, as found in the human genome build Grch37/hg19. In one embodiment, each of said genomic regions is distinct and identified by sequence comparison as corresponding to, or defined by, or defined in reference to, one of SEQ ID NO: 1 to 1026, as found in the human genome build Grch37/hg19.

[0145] In one embodiment, the kit of the invention comprise a set of capture probe, wherein said set of capture probe consists of capture probes specific for 10 genomic regions wherein each of said genomic regions is distinct and identified by sequence comparison as corresponding to, or defined by, or defined in reference to, one of SEQ ID NO: 601 to 610, as found in the human genome build Grch37/hg19.

[0146] In one embodiment, the kit of the invention comprise a set of capture probe, wherein said set of capture probe consists of capture probes specific for 11 genomic regions wherein each of said genomic regions is distinct and identified by sequence comparison as corresponding to, or defined by, or defined in reference to, one of SEQ ID NO: 601 to 611, as found in the human genome build Grch37/hg19.

[0147] In one embodiment, the kit of the invention comprise a set of capture probe, wherein said set of capture probe consists of capture probes specific for 12 genomic regions wherein each of said genomic regions is distinct and identified by sequence comparison as corresponding to, or defined by, or defined in reference to, one of SEQ ID NO: 601 to 612, as found in the human genome build Grch37/hg19.

[0148] In one embodiment, the kit of the invention comprise a set of capture probe, wherein said set of capture probe consists of capture probes specific for 13 genomic regions wherein each of said genomic regions is distinct and identified by sequence comparison as corresponding to, or defined by, or defined in reference to, one of SEQ ID NO: 601 to 613, as found in the human genome build Grch37/hg19.

[0149] In one embodiment, the kit of the invention comprise a set of capture probe, wherein said set of capture probe consists of capture probes specific for 14 genomic regions wherein each of said genomic regions is distinct and identified by sequence comparison as corresponding to, or defined by, or defined in reference to, one of SEQ ID NO: 601 to 614, as found in the human genome build Grch37/hg19.

[0150] In one embodiment, the kit of the invention comprise a set of capture probe, wherein said set of capture probe consists of capture probes specific for 15 genomic regions wherein each of said genomic regions is distinct and identified by sequence comparison as corresponding to, or defined by, or defined in reference to, one of SEQ ID NO: 601 to 615, as found in the human genome build Grch37/hg19.

[0151] In one embodiment, the kit of the invention comprise a set of capture probe, wherein said set of capture probe consists of capture probes specific for 29 genomic regions wherein each of said genomic regions is distinct and identified by sequence comparison as corresponding to, or defined by, or defined in reference to, one of SEQ ID NO: 601 to 629, as found in the human genome build Grch37/hg19.

[0152] In one embodiment, the kit of the invention comprise a set of capture probe, wherein said set of capture probe consists of capture probes specific for 2, 3, 4, 5, 6, 7, 8, 9, 10, 11, 12, 13, 14, 15, 16, 17, 18, 19, 20, 21, 22, 23, 24, 25, 26, 27, 28, 29, 30, 31, 32, 33, 34, 35, 36, 37, 38, 39, 40, 41, 42, 43, 44, 45, 46, 47, 48, 49, 50, 51, 52, 53, 54, 55, 56, 57, 58, 59, 60, 61, 62, 63, 64, 65, 66, 67, 68, 69, 70, 71, 72, 73, 74, 75, 76, 77, 78, 79, 80, 81, 82, 83, 84, 85, 86, 87, 88, 89, 90, 91, 92, 93, 94, 95, 96, 97, 98, 99, 100, 101, 102, 103, 104, 105, 106, 107, 108, 109, 110, 111, 112, 113, 114, 115, 116, 117, 118, 119, 120, 121, 122, 123, 124, 125, 126, 127, 128, 129, 130, 131, 132, 133, 134, 135, 136, 137, 138, 139, 140, 141, 142, 143, 144, 145, 146, 147, 148, 149, 150, 151, 152, 153, 154, 155, 156, 157, 158, 159, 160, 161, 162, 163, 164, 165, 166, 167, 168, 169, 170, 171, 172, 173, 174, 175, 176, 177, 178, 179, 180, 181, 182, 183, 184, 185, 186, 187, 188, 189, 190, 191, 192, 193, 194, 195, 196, 197, 198, or 200 genomic regions, wherein each of said genomic regions is distinct and identified by sequence comparison as corresponding to, or defined by, or defined in reference to, one of SEQ ID NO: 1 to 200, as found in the human genome build Grch37/hg19.

[0153] In one embodiment, the kit of the invention comprise a set of capture probe, wherein said set of capture probe consists of capture probes specific for 2, 3, 4, 5, 6, 7, 8, 9, 10, 11, 12, 13, 14, 15, 16, 17, 18, 19, 20, 21, 22, 23, 24, 25, 26, 27, 28, 29, 30, 31, 32, 33, 34, 35, 36, 37, 38, 39, 40, 41, 42, 43, 44, 45, 46, 47, 48, 49, 50, 51, 52, 53, 54, 55, 56, 57, 58, 59, 60, 61, 62, 63, 64, 65, 66, 67, 68, 69, 70, 71, 72, 73, 74, 75, 76, 77, 78, 79, 80, 81, 82, 83, 84, 85, 86, 87, 88, 89, 90, 91, 92, 93, 94, 95, 96, 97, 98, 99, 100, 101, 102, 103, 104, 105, 106, 107, 108, 109, 110, 111, 112, 113, 114, 115, 116, 117, 118, 119, 120, 121, 122, 123, 124, 125, 126, 127, 128, 129, 130, 131, 132, 133, 134, 135, 136, 137, 138, 139, 140, 141, 142, 143, 144, 145, 146, 147, 148, 149, 150, 151, 152, 153, 154, 155, 156, 157, 158, 159, 160, 161, 162, 163, 164, 165, 166, 167, 168, 169, 170, 171, 172, 173, 174, 175, 176, 177, 178, 179, 180, 181, 182, 183, 184, 185, 186, 187, 188, 189, 190, 191, 192, 193, 194, 195, 196, 197, 198 or 199, preferably 200, 201, 202, 203, 204, 205, 206, 207, 208, 209, 210, 211, 212, 213, 214, 215, 216, 217, 218, 219, 220, 221, 222, 223, 224, 225, 226, 227, 228, 229, 230, 231, 232, 233, 234, 235, 236, 237, 238, 239, 240, 241, 242, 243, 244, 245, 246, 247, 248, 249, 250, 251, 252, 253, 254, 255, 256, 257, 258, 259, 260, 261, 262, 263, 264, 265, 266, 267, 268, 269, 270, 271, 272, 273, 274, 275, 276, 277, 278, 279, 280, 281, 282, 283, 284, 285, 286, 287, 288, 289, 290, 291, 292, 293, 294, 295, 296, 297, 298, 299, 300, 301, 302, 303, 304, 305, 306, 307, 308, 309, 310, 311, 312, 313, 314, 315, 316, 317, 318, 319, 320, 321, 322, 323, 324, 325, 326, 327, 328, 329, 330, 331, 332, 333, 334, 335, 336, 337, 338, 339, 340, 341, 342, 343, 344, 345, 346, 347, 348, 349, 350, 351, 352, 353, 354, 355, 356, 357, 358, 359, 360, 361, 362, 363, 364, 365, 366, 367, 368, 369, 370, 371, 372, 373, 374, 375, 376, 377, 378, 379, 380, 381, 382, 383, 384, 385, 386, 387, 388, 389, 390, 391, 392, 393, 394, 395, 396, 397, 398, 399, 400, 401, 402, 403, 404, 405, 406, 407, 408, 409, 410, 411, 412, 413, 414, 415, 416, 417, 418, 419, 420, 421, 422, 423, 424, 425, 426, 427, 428, 429, 430, 431, 432, 433, 434, 435, 436, 437, 438, 439, 440, 441, 442, 443, 444, 445, 446, 447, 448, 449, 450, 451, 452, 453, 454, 455, 456, 457, 458, 459, 460, 461, 462, 463, 464, 465, 466, 467, 468, 469, 470, 471, 472, 473, 474, 475, 476, 477, 478, 479, 480, 481, 482, 483, 484, 485, 486, 487, 488, 489, 490, 491, 492, 493, 494, 495, 496, 497, 498, 499, 500, 501, 502, 503, 504, 505, 506, 507, 508, 509, 510, 511, 512, 513, 514, 515, 516, 517, 518, 519, 520, 521, 522, 523, 524, 525, 526, 527, 528, 529, 530, 531, 532, 533, 534, 535, 536, 537, 538, 539, 540, 541, 542, 543, 544, 545, 546, 547, 548, 549, 550, 551, 552, 553, 554, 555, 556, 557, 558, 559, 560, 561, 562, 563, 564, 565, 566, 567, 568, 569, 570, 571, 572, 573, 574, 575, 576, 577, 578, 579, 580, 581, 582, 583, 584, 585, 586, 587, 588, 589, 590, 591, 592, 593, 594, 595, 596, 597, 598, 599, or 600 genomic regions, wherein each of said genomic region consists of, a sequence having at least 90%, 91%, 92%, 93% or 94%, preferably having at least 95%, 96%, 97%, or 98%, more preferably having at least 99% sequence identity with one distinct sequence selected from the group consisting of SEQ ID NO: 1 to 600. In one embodiment, each of said at least two genomics regions consists of one sequence selected from the group consisting of SEQ ID NO: 1 to 600.

[0154] In one embodiment, the kit of the invention comprise a set of capture probe, wherein said set of capture probe consists of capture probes specific for 10, 11, 12, 13, 14, 15, 16, 17, 18, 19, 20, 21, 22, 23, 24, 25, 26, 27, 28, 29, 30, 31, 32, 33, 34, 35, 36, 37, 38, 39, 40, 41, 42, 43, 44, 45, 46, 47, 48, 49, 50, 51, 52, 53, 54, 55, 56, 57, 58, 59, 60, 61, 62, 63, 64, 65, 66, 67, 68, 69, 70, 71, 72, 73, 74, 75, 76, 77, 78, 79, 80, 81, 82, 83, 84, 85, 86, 87, 88, 89, 90, 91, 92, 93, 94, 95, 96, 97, 98, 99, 100, 101, 102, 103, 104, 105, 106, 107, 108, 109, 110, 111, 112, 113, 114, 115, 116, 117, 118, 119, 120, 121, 122, 123, 124, 125, 126, 127, 128, 129, 130, 131, 132, 133, 134, 135, 136, 137, 138, 139, 140, 141, 142, 143, 144, 145, 146, 147, 148, 149, 150, 151, 152, 153, 154, 155, 156, 157, 158, 159, 160, 161, 162, 163, 164, 165, 166, 167, 168, 169, 170, 171, 172, 173, 174, 175, 176, 177, 178, 179, 180, 181, 182, 183, 184, 185, 186, 187, 188, 189, 190, 191, 192, 193, 194, 195, 196, 197, 198 or 199, preferably 200, 201, 202, 203, 204, 205, 206, 207, 208, 209, 210, 211, 212, 213, 214, 215, 216, 217, 218, 219, 220, 221, 222, 223, 224, 225, 226, 227, 228, 229, 230, 231, 232, 233, 234, 235, 236, 237, 238, 239, 240, 241, 242, 243, 244, 245, 246, 247, 248, 249, 250, 251, 252, 253, 254, 255, 256, 257, 258, 259, 260, 261, 262, 263, 264, 265, 266, 267, 268, 269, 270, 271, 272, 273, 274, 275, 276, 277, 278, 279, 280, 281, 282, 283, 284, 285, 286, 287 or 288 genomic regions wherein each of said genomic region consists of a sequence having at least 90%, 91%, 92%, 93% or 94%, preferably having at least 95%, 96%, 97%, or 98%, more preferably having at least 99% sequence identity with one distinct sequence selected from the group consisting of SEQ ID NO: 1 to 3472. In one embodiment, each of said genomic region consists of a sequence having at least 90%, 91%, 92%, 93% or 94%, preferably having at least 95%, 96%, 97%, or 98%, more preferably having at least 99% sequence identity with one distinct sequence selected from the group consisting of SEQ ID NO: 1 to 1768. In one embodiment, each of said genomic region consists of a sequence having at least 90%, 91%, 92%, 93% or 94%, preferably having at least 95%, 96%, 97%, or 98%, more preferably having at least 99% sequence identity with one distinct sequence selected from the group consisting of SEQ ID NO: 1 to 1026.

[0155] In one embodiment, the kit of the invention comprise a set of capture probe, wherein said set of capture probe consists of capture probes specific for 10 genomic regions wherein each of said genomic region consists of a sequence having at least 90%, 91%, 92%, 93% or 94%, preferably having at least 95%, 96%, 97%, or 98%, more preferably having at least 99% sequence identity with one distinct sequence selected from the group consisting of SEQ ID NO: 601 to 610.

[0156] In one embodiment, the kit of the invention comprise a set of capture probe, wherein said set of capture probe consists of capture probes specific for 11 genomic regions wherein each of said genomic region consists of a sequence having at least 90%, 91%, 92%, 93% or 94%, preferably having at least 95%, 96%, 97%, or 98%, more preferably having at least 99% sequence identity with one distinct sequence selected from the group consisting of SEQ ID NO: 601 to 611.

[0157] In one embodiment, the kit of the invention comprise a set of capture probe, wherein said set of capture probe consists of capture probes specific for 12 genomic regions wherein each of said genomic region consists of a sequence having at least 90%, 91%, 92%, 93% or 94%, preferably having at least 95%, 96%, 97%, or 98%, more preferably having at least 99% sequence identity with one distinct sequence selected from the group consisting of SEQ ID NO: 601 to 612.

[0158] In one embodiment, the kit of the invention comprise a set of capture probe, wherein said set of capture probe consists of capture probes specific for 13 genomic regions wherein each of said genomic region consists of a sequence having at least 90%, 91%, 92%, 93% or 94%, preferably having at least 95%, 96%, 97%, or 98%, more preferably having at least 99% sequence identity with one distinct sequence selected from the group consisting of SEQ ID NO: 601 to 613.

[0159] In one embodiment, the kit of the invention comprise a set of capture probe, wherein said set of capture probe consists of capture probes specific for 14 genomic regions wherein each of said genomic region consists of a sequence having at least 90%, 91%, 92%, 93% or 94%, preferably having at least 95%, 96%, 97%, or 98%, more preferably having at least 99% sequence identity with one distinct sequence selected from the group consisting of SEQ ID NO: 601 to 614.

[0160] In one embodiment, the kit of the invention comprise a set of capture probe, wherein said set of capture probe consists of capture probes specific for 15 genomic regions wherein each of said genomic region consists of a sequence having at least 90%, 91%, 92%, 93% or 94%, preferably having at least 95%, 96%, 97%, or 98%, more preferably having at least 99% sequence identity with one distinct sequence selected from the group consisting of SEQ ID NO: 601 to 615.

[0161] In one embodiment, the kit of the invention comprise a set of capture probe, wherein said set of capture probe consists of capture probes specific for 29 genomic regions wherein each of said genomic region consists of a sequence having at least 90%, 91%, 92%, 93% or 94%, preferably having at least 95%, 96%, 97%, or 98%, more preferably having at least 99% sequence identity with one distinct sequence selected from the group consisting of SEQ ID NO: 601 to 629.

[0162] In one embodiment, the kit of the invention comprise a set of capture probe, wherein said set of capture probe consists of capture probes specific for 2, 3, 4, 5, 6, 7, 8, 9, 10, 11, 12, 13, 14, 15, 16, 17, 18, 19, 20, 21, 22, 23, 24, 25, 26, 27, 28, 29, 30, 31, 32, 33, 34, 35, 36, 37, 38, 39, 40, 41, 42, 43, 44, 45, 46, 47, 48, 49, 50, 51, 52, 53, 54, 55, 56, 57, 58, 59, 60, 61, 62, 63, 64, 65, 66, 67, 68, 69, 70, 71, 72, 73, 74, 75, 76, 77, 78, 79, 80, 81, 82, 83, 84, 85, 86, 87, 88, 89, 90, 91, 92, 93, 94, 95, 96, 97, 98, 99, 100, 101, 102, 103, 104, 105, 106, 107, 108, 109, 110, 111, 112, 113, 114, 115, 116, 117, 118, 119, 120, 121, 122, 123, 124, 125, 126, 127, 128, 129, 130, 131, 132, 133, 134, 135, 136, 137, 138, 139, 140, 141, 142, 143, 144, 145, 146, 147, 148, 149, 150, 151, 152, 153, 154, 155, 156, 157, 158, 159, 160, 161, 162, 163, 164, 165, 166, 167, 168, 169, 170, 171, 172, 173, 174, 175, 176, 177, 178, 179, 180, 181, 182, 183, 184, 185, 186, 187, 188, 189, 190, 191, 192, 193, 194, 195, 196, 197, 198, 199 or 200 genomic regions, wherein each of said genomic region consists of, a sequence having at least 90%, 91%, 92%, 93% or 94%, preferably having at least 95%, 96%, 97%, or 98%, more preferably having at least 99% sequence identity with one distinct sequence selected from the group consisting of SEQ ID NO: 1 to 200. In one embodiment, each of said genomics regions consists of one sequence selected from the group consisting of SEQ ID NO: 1 to 200.

[0163] The present invention also relates to the use of the kit of the invention for the stratification, preferably presymptomatic stratification, of a pregnant subject for her preeclampsia risk, for the evaluation, preferably presymptomatic evaluation, of the risk of developing preeclampsia in a subject, for the prognosis, preferably presymptomatic prognosis, of preeclampsia in a subject and/or for the prediction, preferably presymptomatic prediction, of the risk of developing preeclampsia in a subject. In one embodiment, the present invention relates to the use of the kit of the invention for the prediction of the risk of developing preeclampsia in a human subject.

[0164] In one embodiment, the present invention relates to the use of a kit for the presymptomatic prediction of the risk of developing preeclampsia in a human subject, wherein said kit comprises a set of capture probe specific for at least 2 genomic DNA regions and wherein each of said at least two genomic regions is distinct and identified by sequence comparison as corresponding to, or defined by, or defined in reference to, one of SEQ ID NO: 1 to 600, as found in the human genome build Grch37/hg19, preferably identified by sequence comparison as corresponding to, or defined by, or defined in reference to, one of SEQ ID NO: 1 to 200, as found in the human genome build Grch37/hg19.

[0165] The methods and kits of the invention may be used during the first trimester of pregnancy. As such, it is possible to use the method of the invention in combination without other test realized during the first trimester of pregnancy. Example of such test include, without being limited to, the non-invasive prenatal tests (NIPT), such as the Harmony prenatal test, CentoNIPT, percept NIPT, Vanadis NIPT, VERACITY and others.

[0166] The present invention further relates to methods for preventing preeclampsia in a pregnant human subject comprising the steps of:
[0167] a. determining the risk of developing preeclampsia when said subject's gestational age is under 140 days using the method of the invention for the prediction of the risk of developing preeclampsia, and,
[0168] b. administering to subject identified at step (a) as being at risk of developing preeclampsia, an effective dose of a treatment preventing the development of preeclampsia.

[0169] In one embodiment, said treatment preventing the development of preeclampsia comprises aspirin.

### BRIEF DESCRIPTION OF THE DRAWINGS

[0170] FIG. 1 is a receiver operating characteristic curve of 500 iterations of a 10-fold cross-validation elastic net analysis, trained on 80% of the DNA methylation measures for the 200 regions showing the most significant differences in DNA methylation between control and preeclamptic placentas and validated on 20% of the correctly labelled data (dashed line), or the same data after label randomization (full line). (value±SEM).

[0171] FIG. 2 is a whisker plot of the DNA concentrations of bisulfite sequencing libraries prepared from cfDNA samples derived from matched controls (control, n=9) and preeclamptic pregnancies (cases, n=21) and obtained at the time of preeclampsia diagnosis. P: significance calculated using a Wilcoxon test.

[0172] FIG. 3 is a receiver operating characteristic curve of 500 iterations of a 10-fold cross-validation elastic net analysis, trained on 80% of the DNA methylation measures for the 200 regions showing the most significant differences in DNA methylation between cfDNA samples from control and preeclamptic pregnancies obtained at the time of preeclampsia diagnosis and validated on 20% of the correctly labelled data (dashed line), or the same data after label randomization (full line). (value±SEM).

[0173] FIG. 4 is a receiver operating characteristic curve of 500 iterations of a 10-fold cross-validation elastic net analysis, trained on 80% of the DNA methylation measures for the 200 regions showing the most significant differences in DNA methylation cfDNA samples from control and preeclamptic pregnancies obtained at around 12 weeks of gestation and validated on 20% of the correctly labelled data (dashed line), or the same data after label randomization (full line). (value±SEM).

[0174] FIG. 5 is a set of receiver operating characteristic curve of 20 iterations of a 10-fold cross-validation elastic net analysis, trained on 1436 (FIG. 5A), 1149 (FIG. 5B), 862 (FIG. 5C), 288 (FIG. 5D), 29 (FIG. 5E), 15 (FIG. 5F) and 12 (FIG. 5G) randomly selected genomic regions from 2872 genomic regions (SEQ ID NO. 601 to SEQ ID 3472). AUC: Area Under Curve.

[0175] FIG. 6 is a set of set of receiver operating characteristic curve of 20 iterations of a 10-fold cross-validation elastic net analysis, trained on the 1436 (FIG. 6A), 1149 (FIG. 6B), 862 (FIG. 6C), 288 (FIG. 6D), 29 (FIG. 6E), 15 (FIG. 6F), 12 (FIG. 6G), 11 (FIG. 6H), 10 (FIG. 6I) and 9 (FIG. 6J) genomic regions with the highest absolute coefficient. AUC: Area Under Curve.

### EXAMPLES

[0176] The present invention is further illustrated by the following examples.

### Example 1: Analysis of Placental DNA Methylation Profile after Delivery

### Materials and Methods

### Patient Enrolment

[0177] Patients affected with preeclampsia and gestational age-matched controls were selected and enrolled in this study. Preeclampsia was defined as a new-onset hypertension (systolic blood pressure ≥140 mmHg or diastolic blood pressure ≥90 mmHg on at least two occasions at least four hours apart, or a systolic blood pressure ≥160 mmHg on a single occasion) and the coexistence of one or more of the following new-onset condition: proteinuria (≥0.3 g in a 24-hour urine specimen or protein/creatinine ratio ≥0.3 (mg/mg) in a random urine specimen), uteroplacental dysfunction (such as fetal growth restriction, abnormal umbilical artery doppler waveform analysis or stillbirth), thrombocytopenia (platelet count <100,000/microL), renal insufficiency (serum creatinine ≥1.1 mg/dl or doubling of serum creatinine in the absence of other renal disease), elevated liver transaminases (twice normal concentration), pulmonary oedema, or neurological complications (such as eclampsia, altered mental status, severe headaches or persistent visual scotomata) between 20 and 34 weeks of gestation. Control patients were matched for significant preeclampsia risk factors, including age, BMI and parity. The study was approved by the Medical Ethics Committee of University Hospitals Leuven (B322201838047) and informed written consent was obtained from all the participants, when applicable.

### Placental DNA Sample Collection and Processing

[0178] After delivery, placental tissue samples were taken from patients and controls for DNA extraction (Table 1). Placental DNA extraction was performed using the DNeasy Blood & Tissue Kit (QIAGEN).

TABLE 1
Clinical characteristics of placental DNA samples
from preeclamptic cases and control pregnancies

| | Case | Control | P value |
|---|---|---|---|
| Amount | 11 | 26 | |
| Caucasian / Non-Caucasian | 11 / 0 | 23 / 3 | 0.61^{#} |
| Maternal age (years, Mean ± SD, | 30.5 ± 3.9 | 29.2 ± 4.24 | 0.25^{§} |
| [range]) | [22-35] | [20-38] | |
| Gestational age at sampling | 223 ± 20 | 272 ± 10 | <0.001^{§} |
| (days, Mean ± SD [range]) | [172-246] | [247-284] | |
| Body mass index (kg/m2, | 24.3 ± 4.9 | 25.0 ± 5.4 | 0.83^{§} |
| Mean ± SD, [range]) | [17.7-33.3] | [18.6-42.9] | |
| Nulliparous / Multiparous | 8 / 3 | 13 / 13 | 0.36^{#} |
| Previous pregnancy without / with | 1 / 2 | 13 / 0 | 0.029^{#} |
| preeclampsia | | | |
| History of smoking (Yes / No / | 1 / 9 / 1 | 5 / 21 / 0 | 0.87^{#} |
| NA) | | | |
| Aspirin intake (Yes / No) | 2 / 9 | 1 / 25 | 0.42^{#} |

P values calculated according to
^{#}chi-square or
^{§}Wilcoxon signed-rank test

Bisulfite Conversion and Library Preparation 500 ng of placental DNA was treated with bisulfite using EZ DNA Methylation-Lightning Kit (Zymo Research). Library preparation was carried out within one hour after bisulfite treatment using the ACCEL-NGS® 1S PLUS DNA Library Kit (Westburg, The Netherlands) which uses an adaptase-induced tailing step of the bisulfite-converted DNA prior to library preparation. The protocol was modified and optimized in house in order to allow the procession of bisulfite converted DNA as previously described (Galle et al., Clin Epigenetics. 2020 Feb. 14; 12(1):27). Following amplification using KAPA HiFi HotStart Uracil+ ReadyMix (Roche, Belgium), DNA library concentrations were quantified using Nanodrop, and fragment lengths were analyzed using Bioanalyzer HS. Up to 16 samples, each with uniquely indexes, were pooled together in an equimolar fashion before target enrichment. Care was taken to include case and control samples for processing and analysis in the same batch, and mixed in the same capture pool, to avoid batch-induced artefacts.

### Selection of CpG Targets, Probe Design and Bisulfite-DNA Capture

[0179] We performed an enrichment of targets of interest prior to sequencing to avoid costly whole-genome bisulfite sequencing. A custom set of capture probes was designed to specifically profile 34,735 regions of interest. This customized set encompasses all 25,295 region containing one or more CpGs with a low level of methylation (average methylation level <3%) in blood as measured in healthy controls using the Illumina 450K array (Hannum et al., Molecular Cell 2013, 24 Jan.; 49(2):359), and an additional 10,011 region that show high methylation in placental tissue (methylation level >30%) but low methylation in blood (methylation level <10%) based on whole-genome bisulfite sequencing data (Court et al., Genome Res. 2014 April; 24(4): 554; Kunde-Ramamoorthy et al., Nucleic Acids Res. 2014 April; 42(6): e43). 571 regions overlap in both datasets. The design and production of the corresponding capture probes was done by Roche NimbleGen (Pleasanton, CA, USA). Target enrichment was performed as previously described (Galle et al., Clin Epigenetics. 2020 Feb. 14; 12(1):27), and the resulting libraries were sequenced in house on an Illumina HiSeq4000.

### Sequencing Data Analysis

[0180] Sequencing reads were processed with TrimGalore (Krueger, F. Trim Galore! https://web.archive.org/web/20200915171508/http://www.bioinformatics.babraha m.ac.uk/projects/trim_galore/—version 0.6.4_dev) to remove potential adapter contamination, and to trim off the adaptase-induced addition of random nucleotides. Next, trimmed reads were mapped to human genome build Grch37/hg19 using Bismark (v0.22.3), with multi-seed length of 20 bp and 1 mismatch. Duplicate copies of reads, having identical start and end sites, were subsequently removed, and the remaining, deduplicated reads were used for methylation calling using Bismark (Krueger & Andrews, Bioinformatics. 2011 Jun. 1; 27(11):1571-2). Further analysis was performed using R (R Core Team. R: A Language and Environment for Statistical Computing. R Foundation for Statistical Computing 2020)—v3.6.2). The methylation level of each region of interest was defined as the ratio of methylated C bases in a CpG context, relative to the total detected C bases (methylated and unmethylated C bases) in a CpG context in this region. Regions of interest with less than 20 quantified CpGs were considered as NA and regions which contain NA in more than 5% of samples were removed. For elastic net analyses, regions with missing values were imputed by the average methylation level for this locus across samples. Samples having estimated bisulfite conversion rates below 98.5% (as estimated by the CH methylation) or fewer than 50 CpGs quantified for DNA methylation in over 30% of regions of interest were filtered out as low-quality samples.

### Selection of Informative Loci and Elastic Net Analyses.

[0181] The R package limma (Ritchie et al., Nucleic Acids Res. 2015 Apr. 20; 43(7): e47) was used to perform a moderated t-test, contrasting DNA methylation levels between cases and controls. The Benjamini-Horchberg method was used by limma to adjust p-values for multiple testing. The 200 most significantly different regions-of-interest were taken forward for unsupervised hierarchical clustering according Ward D's method and visualized using the R package heatmap.2. Next, models were built using a random subset of 80% of all included samples. The 200 most significantly different regions-of-interest from this subset of samples were identified and used as input for building a Lasso and an elastic-net regularized generalized linear model using R package Glmnet. (Friedman & Hastie, J Stat Softw. 2010; 33(1): 1-22) The in-built 10-fold cross-validation function was used to select optimal tuning parameter λ for the model. Different elastic net mixing parameters α were tested in model building, and the optimum (α=0.2) was used throughout all analyses presented. The resultant model was applied to the remaining 20% of samples to estimate model performance in an independent dataset. 500 iterations were done to assess the associated variance. To validate these analyses, we also randomized the “case” and “control” labels and built a model 500 times.

### Results and Conclusions

[0182] Placental DNA methylation from pregnancies complicated by preeclampsia (n=11) or control pregnancies (n=26) (Table 1) was analyzed. We applied stringent data quality filters (see Methods hereinabove), and next correlated the presence of preeclampsia with methylation levels using moderated t-statistics. Out of 33,123 informative regions, 939 and 1,560 showed significant hyper- and hypomethylation respectively (P<0.05), and 1 and 18 survived multiple-testing correction (FDR<5%). Unsupervised hierarchical clustering demonstrated that case and control samples invariably grouped separately. To assess if DNA methylation levels were sufficient to predict whether placentas were from preeclamptic pregnancies, we randomly selected a training dataset consisting of 80% of the samples from our data, and built a generalized linear model using a 10-fold cross-validation elastic net analysis. The resultant optimal model was applied on the remaining 20% of samples, which enabled us to calculate specificity and sensitivity using the Area Under the Receiver Operating Characteristics (AUROC), which reflect the diagnostic ability of a binary classifier. After 500 iterations of rebuilding and testing model, we measured an average AUROC of 0.980, which was significantly different from the AUROC of 0.50 when randomly reassigning case and control labels (FIG. 1). These data demonstrate that preeclampsia is associated with changes in DNA methylation in the placenta. Changes were predominantly found near genes with ontologies associated to processes involved in development as well as stress and immune responses, in line with the known pathophysiology of preeclampsia.

### Example 2: Analysis of cfDNA Methylation Profile at Time of Diagnosis

### Materials and Methods

[0183] Materials and Methods were identical to those of Example 1, except for the following.

cfDNA Sample Collection and Processing

[0184] Blood samples were taken for cfDNA extraction from patients at the time of preeclampsia diagnosis (between 20 and 34 weeks of gestation), or from controls at a similar moment in gestation (Table 2). Blood samples were collected into Cell-Free DNA collection tubes (Roche Diagnostics, Germany). Standard centrifugation was used for plasma isolation. CfDNA extraction was performed automatically, using the Maxwell HT cfDNA kit (Promega) on the Hamilton Liquid Handler according to the manufacturer's recommendations.

TABLE 2
Clinical characteristics of cfDNA samples at
preeclampsia diagnosis and matching controls

| | Case | Control | P value |
|---|---|---|---|
| Amount | 21 | 9 | |
| Caucasian / Non-Caucasian | 20 / 1 | 8 / 1 | 1^{#} |
| Maternal age (years, Mean ± SD, | 30.3 ± 3.9 | 30.2 ± 3.8 | 0.856^{§} |
| [range]) | [22-38] | [25-37] | |
| Gestational age at sampling | 214 ± 22 | 210 ± 18 | 0.377^{§} |
| (days, Mean ± SD [range]) | [167-241] | [171-231] | |
| Body mass index (kg/m², | 25.0 ± 5.1 | 23.6 ± 4.23 | 0.44^{§} |
| Mean ± SD, [range]) | [17.6-33.3] | [18.7-29.0] | |
| Nulliparous / Multiparous | 15 / 6 | | 0.72^{#} |
| Previous pregnancy without / with | 4 / 2 | 5 / 4 | 0.214^{#} |
| preeclampsia | | 4 / 0 | |
| History of smoking (Yes / No / | 2 / 17 / 2 | 1 / 8 /0 | 1^{#} |
| NA) | | | |
| Aspirin intake (Yes / No) | 6 / 15 | 0 / 9 | 0.20^{#} |

P values calculated according to
^{#}chi-square or
^{§}Wilcoxon signed-rank test

### Bisulfite Conversion and Library Preparation

[0185] 10 to 20 μL of cfDNA was treated as described in example 1.

### Results and Conclusions

[0186] cfDNA methylation obtained from preeclampsia patients at the time of diagnosis (n=21) and matched controls (n=9) (Table 2) was analyzed to assess if DNA methylation changes were similarly evident in this minimally invasively obtained material. Notably, we observed striking differences between cfDNA concentrations from preeclampsia patients and from controls, as library yields were on average 10-fold higher (FIG. 2; P=1.4×10⁻⁷). We also observed differences in DNA methylation between cases and controls in these samples, with 466 and 2,345 of 30,203 informative regions showing significant DNA hyper- and hypomethylation (P<0.05), and hypomethylation at 1 region surviving multiple testing correction (FDR<5%). Remarkably, although there was a significant overlap between regions showing differential methylation in placental tissue and cfDNA (1.4-fold enrichment; P=0.018), a large fraction of regions also showed changes independent from those observed in placental DNA, suggesting that the cfDNA methylation changes in part reflect placenta-independent aspects of preeclampsia. Unsupervised hierarchical clustering unambiguously classified most cases and controls separately. A 10-fold cross-validation of an elastic net analysis moreover confirmed the diagnostic potential, as we measured an average AUROC of 0.839, which was significantly different from the AUROC of 0.50 when randomly assigning case and control labels (FIG. 3). These data demonstrate that preeclampsia is associated with changes in cfDNA methylation at the time of diagnosis.

### Example 3: Analysis of cfDNA Methylation Profile Before the Onset of Symptoms

### Materials and Methods

[0187] Materials and Methods were identical to those of Examples 1 and 2, except for the following.

cfDNA Sample Collection and Processing

[0188] Women diagnosed with preeclampsia and matched controls provided blood samples for non-invasive prenatal testing for common trisomies, which is routinely carried out at our center (Table 3). These cfDNA samples were taken well before the onset of early preeclampsia symptoms, at 10 to 12 weeks of gestation, and left-over cfDNA material was stored for 1 year after analysis. cfDNA was extracted from plasma from the samples as described above.

TABLE 3
Clinical characteristics of presymptomatic cfDNA samples

| | Case | Control | P value |
|---|---|---|---|
| Amount | 26 | 10 | |
| Caucasian / Non-Caucasian | 26 / 0 | 9 / 1 | 0.61^{#} |
| Maternal age (years, Mean ± SD, | 29.7 ± 4.3 | 31.2 ± 4.1 | 0.5^{§} |
| [range]) | [20-38] | [25-37] | |
| Gestational age at sampling | 85.7 ± 6.1 | 86.3 ± 5.1 | 0.90^{§} |
| (days, Mean ± SD [range]) | [67-101] | [78-94] | |
| Body mass index (kg/m², | 24.6 ± 3.8 | 23.0 ± 3.8 | 0.32^{§} |
| Mean ± SD, [range]) | [18.6-32.0] | [18.6-29.7] | |
| Nulliparous / Multiparous | 19 / 7 | 6 / 4 | 0.72^{#} |
| Previous pregnancy without / with | 3 / 4 | 4 / 0 | 0.21^{#} |
| preeclampsia | | | |
| History of smoking (Yes / No / | 2 / 22 / 2 | 5 / 21 / 0 | 1^{#} |
| NA) | | | |
| Aspirin intake (Yes / No) | 9 / 17 | 0 / 10 | 0.086^{#} |

P values calculated according to
^{#}chi-square or
^{§}Wilcoxon signed-rank test

### Results and Conclusions

[0189] We assessed if DNA methylation changes could also be observed earlier in the pregnancy, before the clinical manifestation of preeclampsia, in a time window relevant for therapeutic intervention. The cfDNA samples were taken well before the onset of symptoms, at 10 to 12 weeks of gestation (Table 3), and left-over cfDNA material was stored for 1 year after analysis. This allowed us to quantify methylation in cfDNA samples from pregnancies that would go on to develop preeclampsia. We analyzed 26 cases and 10 controls and observed that 348 and 1,195 of 30,456 informative regions showing significant DNA hyper- and hypomethylation (P<0.05). 600 regions (SEQ ID NO: 1 to 600) showed a P value below 0.02, indicating particularly informative regions. While none of these regions alone survived multiple testing correction, unsupervised hierarchical clustering of the 200 regions with the lowest P values (SEQ ID NO: 1 to 200—P value below 0.0058) unambiguously classified all cases and controls separately, indicating that a uniform signal was detected. Crucially, to confirm the diagnostic potential at this earlier time point, we again performed a 10-fold cross-validation elastic net binominal logistic regression. Here, we measured in 500 iterations an average AUROC of 0.744, which was significantly better than the AUROC of 0.50 when randomly assigning case and control labels (FIG. 4; P<10⁻¹⁶). We also assessed whether DNA methylation changes were particularly evident in patients with a prior pregnancy complicated by preeclampsia, or in twin pregnancies, both well-established preeclampsia risk factors. Interestingly, while removing the 6 twin pregnancies yielded AUROCs similar to when removing 6 randomly selected cases (500 iterations, AUROC=0.706 versus 0.698; Welch Two Sample t-test P=0.64), we did see a significant AUROC reduction when removing the 4 cases with a prior history of preeclampsia (500 iterations, AUROC=0.631 versus 0.707 for 4 random cases removed; Welch Two Sample t-test P=6.3×10⁻⁷). While these represent only a very limited set of cases with a positive history, it suggests that part of the DNA methylation differences can be ascribed to the processes underlying the strongly increased risk associated with prior preeclampsia-complicated pregnancies. That said, a highly significant predictive signal is also detectable in patients without prior preeclampsia, or in exclusively singleton pregnancies, indicating that cfDNA methylation can predict preeclampsia in such lower-risk cohort as well. When comparing the 1543 genomic regions informative for the prediction of preeclampsia with the 2811 regions reflecting preeclampsia at the time of diagnosis, it is noteworthy to note that only 157 regions are common in the two sets. This finding highlights the fact that the predictive value of DNA methylation profile could not be anticipated from observation reflecting the association between preeclampsia and change in the DNA methylation profiles at the time of diagnosis or later during pregnancy. In conclusion, we propose that measuring cfDNA methylation can be used to stratify pregnancies for their preeclampsia risk. Importantly, the sampling window tested here corresponds to 12±1 weeks of gestation, which is prior to the 16 weeks gestational age at which prophylactic therapy needs to be initiated. It also corresponds to that of the non-invasive prenatal test, which is routinely applied to detect trisomies. This renders cfDNA methylation-based preeclampsia risk assessment achievable as a companion test to routine non-invasive prenatal test, which enhances feasibility by leveraging an accessible and logistically established sampling pipeline.

### Example 4

### Material and Methods

[0190] Women diagnosed with preeclampsia and matched controls provided blood samples for non-invasive prenatal testing for common trisomies, which is routinely carried out at our center. These cfDNA samples were taken well before the onset of early preeclampsia symptoms, at 10 to 12 weeks of gestation, and left-over cfDNA material was stored for 1 year after analysis. cfDNA was extracted from plasma from the samples as described above.

[0191] We analyzed 58 cases and 44 controls, in total 102 subjects, to assess methylation signals that may detect preeclampsia-complicated pregnancies. The elastic net model was used to perform the analysis. The elastic net algorithm estimates the model regression coefficients by minimizing the residual sum of squares and imposing a penalty on the size of regression coefficients concurrently. The penalty can cause the regression coefficients to shrink to zero, meaning that DNA methylation at those regions with a zero-coefficient is not contributing to distinguish cases and controls. Regions with non-zero coefficients therefore are regarded as signals that classify cases. Thus this model performs both selection of features (i.e. regions where DNA methylation is measured) and classification of subjects. Model fitting and parameter tuning by tenfold CV were carried out on the dataset. During each replicate of CV, models were fitted using ninefold of the data. The specified penalty parameter would shrink the coefficients of less important methylation regions to zero. A model based on methylation regions with non-zero coefficients (effective regions) was built and tested on the held-out fold to estimated classification performance. Parameters that resulted in best average performance across replicates were chosen to build a final model and regions with non-zero coefficients (N=2872-SEQ ID 601 to SEQ ID 3472) were obtained. Further region selection was performed based on magnitude of coefficient, which indicates potential importance of the region to classify cases, with a higher magnitude indicating a higher likelihood. The coefficients can be positive or negative values, indicating potential different relationships between the DNA methylation at these regions, and preeclampsia-associated signals. The absolute value of the coefficient, i.e. a non-negative value of the coefficient regardless of the sign, was used to rank the genomic regions. Table 4 includes the absolute coefficient value for each genomic region.

TABLE 4
genomic regions with non-zero coefficients. Coordinates
are indicated on the basis of Grch37/hg19.

| SEQ ID | | | | | Absolute |
|---|---|---|---|---|---|
| NO | Chromosome | Start | End | Coefficient | Coefficient |
| 601 | X | 129305897 | 129306432 | 0.44563298 | 0.445632984 |
| 602 | 5 | 14666162 | 14666315 | −0.3391018 | 0.339102 |
| 603 | 10 | 121261920 | 121262385 | 0.33633071 | 0.33633071 |
| 604 | 19 | 45579767 | 45579906 | −0.3126592 | 0.312659 |
| 605 | 5 | 172660748 | 172662340 | −0.3089095 | 0.308909 |
| 606 | 17 | 46125236 | 46125390 | 0.29877236 | 0.298772364 |
| 607 | 19 | 46997123 | 46997745 | −0.2956219 | 0.295622 |
| 608 | 9 | 123659424 | 123659604 | 0.29275749 | 0.292757493 |
| 609 | 20 | 30457964 | 30458146 | −0.2831058 | 0.283106 |
| 610 | 14 | 99728843 | 99729428 | 0.27668358 | 0.276683583 |
| 611 | 19 | 47983591 | 47983723 | 0.27541626 | 0.275416256 |
| 612 | 19 | 14063060 | 14063265 | −0.2738292 | 0.273829 |
| 613 | 15 | 39915783 | 39915960 | 0.26482185 | 0.264821848 |
| 614 | 13 | 24270029 | 24270358 | −0.2590873 | 0.259087 |
| 615 | 15 | 55700355 | 55700678 | 0.24821106 | 0.248211065 |
| 616 | 1 | 224303916 | 224303990 | −0.2460281 | 0.246028 |
| 617 | 2 | 219858170 | 219858315 | −0.2421708 | 0.242171 |
| 618 | 3 | 197237075 | 197237220 | 0.23891608 | 0.238916081 |
| 619 | 7 | 44788842 | 44788989 | −0.232955 | 0.232955 |
| 620 | 1 | 145548844 | 145549155 | 0.23283134 | 0.232831345 |
| 621 | 6 | 5085328 | 5085471 | −0.2319828 | 0.231983 |
| 622 | 11 | 10955451 | 10955605 | −0.2246658 | 0.224666 |
| 623 | 22 | 31556077 | 31556395 | −0.2226565 | 0.222656 |
| 624 | 3 | 122727816 | 122727966 | 0.22191555 | 0.221915551 |
| 625 | 1 | 201438029 | 201438172 | −0.2198085 | 0.219808 |
| 626 | 11 | 830241 | 830397 | 0.21941195 | 0.21941195 |
| 627 | 17 | 40897048 | 40897223 | −0.2190793 | 0.219079 |
| 628 | 3 | 53916270 | 53916406 | 0.21757986 | 0.21757986 |
| 629 | 16 | 31885329 | 31885538 | −0.2164828 | 0.216483 |
| 630 | 12 | 65217972 | 65219708 | −0.216439 | 0.216439 |
| 631 | 3 | 180630632 | 180630770 | 0.2135661 | 0.213566103 |
| 632 | 12 | 100536359 | 100536504 | 0.2134085 | 0.213408496 |
| 633 | 1 | 214360767 | 214360984 | −0.2111466 | 0.211147 |
| 634 | 12 | 110841850 | 110841978 | −0.2104868 | 0.210487 |
| 635 | 5 | 141348678 | 141348821 | −0.2100991 | 0.210099 |
| 636 | 1 | 181287210 | 181288196 | −0.2096319 | 0.209632 |
| 637 | 17 | 73936994 | 73937378 | −0.2088426 | 0.208843 |
| 638 | 14 | 102258363 | 102258534 | −0.2087761 | 0.208776 |
| 639 | 15 | 85874132 | 85874271 | −0.2086528 | 0.208653 |
| 640 | 18 | 56936803 | 56936927 | 0.20820551 | 0.208205507 |
| 641 | 8 | 134583343 | 134583484 | −0.2079382 | 0.207938 |
| 642 | 2 | 109237708 | 109238030 | 0.20701051 | 0.207010514 |
| 643 | 9 | 36191112 | 36191253 | 0.20579081 | 0.205790809 |
| 644 | 17 | 74380748 | 74380893 | 0.20455692 | 0.204556918 |
| 645 | 14 | 20773860 | 20774004 | −0.2040397 | 0.20404 |
| 646 | 22 | 39542051 | 39542192 | −0.203744 | 0.203744 |
| 647 | 3 | 113416565 | 113416707 | −0.2036623 | 0.203662 |
| 648 | 3 | 169898990 | 169899133 | 0.2031194 | 0.203119405 |
| 649 | 3 | 115377513 | 115377648 | 0.20236239 | 0.20236239 |
| 650 | 19 | 1207046 | 1207185 | 0.20148065 | 0.201480651 |
| 651 | 12 | 27175319 | 27175590 | −0.2006048 | 0.200605 |
| 652 | 1 | 110052274 | 110052631 | 0.20034111 | 0.200341112 |
| 653 | 19 | 18533462 | 18533598 | 0.19816916 | 0.198169161 |
| 654 | 10 | 106113532 | 106113683 | 0.19743232 | 0.197432316 |
| 655 | 1 | 16399983 | 16400137 | −0.1963359 | 0.196336 |
| 656 | 7 | 65958904 | 65959051 | −0.1959121 | 0.195912 |
| 657 | 10 | 74451767 | 74452017 | 0.19540493 | 0.195404926 |
| 658 | 4 | 77997849 | 77997993 | −0.1927314 | 0.192731 |
| 659 | 4 | 6711918 | 6712064 | −0.1917151 | 0.191715 |
| 660 | 4 | 156874695 | 156874828 | 0.19039925 | 0.19039925 |
| 661 | 7 | 32982874 | 32983041 | −0.1896368 | 0.189637 |
| 662 | 2 | 61108815 | 61108965 | −0.1896119 | 0.189612 |
| 663 | 4 | 187111964 | 187112222 | 0.18921565 | 0.189215654 |
| 664 | 11 | 48077382 | 48077816 | −0.1890818 | 0.189082 |
| 665 | 1 | 111991452 | 111991590 | −0.188931 | 0.188931 |
| 666 | 10 | 95314871 | 95315050 | −0.1887875 | 0.188788 |
| 667 | 2 | 45169309 | 45170662 | −0.1878297 | 0.18783 |
| 668 | 5 | 65017179 | 65017316 | −0.1869053 | 0.186905 |
| 669 | 1 | 25665084 | 25665218 | 0.18658822 | 0.186588219 |
| 670 | 13 | 32889784 | 32889943 | 0.18609901 | 0.186099012 |
| 671 | 20 | 31553445 | 31553591 | 0.1859039 | 0.185903898 |
| 672 | 5 | 52284829 | 52284974 | 0.18518667 | 0.18518667 |
| 673 | 17 | 76352467 | 76352752 | 0.18254277 | 0.182542768 |
| 674 | 11 | 44327719 | 44328118 | −0.1823371 | 0.182337 |
| 675 | 1 | 6526320 | 6526459 | 0.18194678 | 0.181946784 |
| 676 | 4 | 13543358 | 13544954 | −0.1813965 | 0.181396 |
| 677 | 5 | 43018204 | 43018361 | 0.18099528 | 0.18099528 |
| 678 | 17 | 80291698 | 80291837 | 0.17964418 | 0.179644175 |
| 679 | 16 | 89752933 | 89753078 | −0.1795752 | 0.179575 |
| 680 | 8 | 41649650 | 41650200 | 0.17877141 | 0.178771408 |
| 681 | 11 | 64064904 | 64065125 | −0.1784622 | 0.178462 |
| 682 | 1 | 119543994 | 119544140 | 0.1782101 | 0.178210097 |
| 683 | 19 | 34919020 | 34919234 | 0.17786967 | 0.177869669 |
| 684 | 1 | 16142234 | 16142374 | 0.17717016 | 0.177170165 |
| 685 | 6 | 26313342 | 26313484 | −0.1769268 | 0.176927 |
| 686 | 17 | 29025182 | 29025306 | 0.17666937 | 0.176669374 |
| 687 | 14 | 81687430 | 81687820 | 0.17510023 | 0.175100234 |
| 688 | 1 | 27019010 | 27019157 | 0.17451113 | 0.174511127 |
| 689 | 11 | 3078544 | 3078689 | −0.1743488 | 0.174349 |
| 690 | 17 | 75370532 | 75370668 | 0.17416869 | 0.174168695 |
| 691 | X | 137794462 | 137794616 | 0.1737521 | 0.173752105 |
| 692 | 13 | 21099799 | 21099943 | −0.1733235 | 0.173323 |
| 693 | 11 | 8615428 | 8615754 | 0.17326636 | 0.173266356 |
| 694 | 5 | 177659508 | 177659647 | −0.172955 | 0.172955 |
| 695 | 2 | 42588715 | 42588911 | −0.1729298 | 0.17293 |
| 696 | 2 | 27546010 | 27546152 | 0.17286965 | 0.172869652 |
| 697 | 8 | 144100463 | 144100598 | 0.17244144 | 0.172441437 |
| 698 | 6 | 149805874 | 149806368 | 0.17238219 | 0.172382188 |
| 699 | 17 | 62008738 | 62008941 | 0.17159763 | 0.171597632 |
| 700 | 1 | 31274718 | 31274946 | 0.17119726 | 0.171197264 |
| 701 | 6 | 123110522 | 123110817 | 0.17104883 | 0.171048831 |
| 702 | 6 | 6461502 | 6461642 | 0.17100517 | 0.171005165 |
| 703 | 12 | 4381700 | 4381973 | 0.17066449 | 0.170664487 |
| 704 | 11 | 2287307 | 2287463 | 0.17021442 | 0.17021442 |
| 705 | 12 | 121837381 | 121837543 | 0.16859453 | 0.16859453 |
| 706 | 1 | 113249576 | 113249713 | −0.168375 | 0.168375 |
| 707 | 10 | 119135222 | 119135373 | 0.16813432 | 0.168134318 |
| 708 | 5 | 87976489 | 87976638 | −0.1676762 | 0.167676 |
| 709 | 16 | 53579404 | 53579579 | 0.16766557 | 0.167665569 |
| 710 | 3 | 194304858 | 194305011 | 0.16637488 | 0.166374879 |
| 711 | 1 | 26438766 | 26438917 | 0.16636018 | 0.166360178 |
| 712 | 16 | 84788210 | 84788383 | 0.16528602 | 0.165286015 |
| 713 | 19 | 40596446 | 40596598 | 0.16473773 | 0.164737732 |
| 714 | 6 | 143265730 | 143265882 | 0.16411617 | 0.164116166 |
| 715 | 16 | 75182490 | 75182636 | −0.1630638 | 0.163064 |
| 716 | 14 | 105161759 | 105161932 | 0.16281328 | 0.162813277 |
| 717 | 4 | 149756225 | 149756362 | 0.16195863 | 0.161958629 |
| 718 | 7 | 87228695 | 87229050 | −0.1619133 | 0.161913 |
| 719 | 16 | 4896864 | 4897003 | 0.16189975 | 0.161899749 |
| 720 | 2 | 60962943 | 60963091 | 0.1616802 | 0.161680205 |
| 721 | 5 | 74162541 | 74162681 | −0.1605474 | 0.160547 |
| 722 | 1 | 150898592 | 150898844 | −0.1602376 | 0.160238 |
| 723 | 11 | 62554757 | 62554944 | −0.1601918 | 0.160192 |
| 724 | 19 | 59073822 | 59073969 | −0.1596988 | 0.159699 |
| 725 | 15 | 74753793 | 74754073 | 0.15793616 | 0.157936162 |
| 726 | 10 | 60028893 | 60029042 | −0.1574458 | 0.157446 |
| 727 | 10 | 7860431 | 7860638 | 0.15726279 | 0.157262792 |
| 728 | 12 | 54673321 | 54673466 | 0.15672621 | 0.156726207 |
| 729 | 9 | 123605161 | 123605302 | 0.15523049 | 0.155230486 |
| 730 | 1 | 59282111 | 59282245 | −0.1551621 | 0.155162 |
| 731 | 2 | 182451457 | 182451598 | −0.1548641 | 0.154864 |
| 732 | 1 | 31538800 | 31539002 | −0.1536343 | 0.153634 |
| 733 | 11 | 59328387 | 59328511 | 0.15320323 | 0.153203227 |
| 734 | 16 | 68119626 | 68119775 | 0.15307605 | 0.153076051 |
| 735 | 12 | 120032192 | 120033349 | −0.1526535 | 0.152654 |
| 736 | 15 | 71841464 | 71841603 | 0.15254958 | 0.152549579 |
| 737 | 9 | 4490236 | 4490385 | 0.15240673 | 0.15240673 |
| 738 | 17 | 4642826 | 4643009 | 0.15203742 | 0.152037423 |
| 739 | 16 | 9184406 | 9184556 | −0.1514956 | 0.151496 |
| 740 | 11 | 62446518 | 62446803 | 0.15104683 | 0.151046834 |
| 741 | 19 | 37064079 | 37064446 | 0.15094702 | 0.150947022 |
| 742 | 17 | 49230802 | 49231010 | −0.1508865 | 0.150887 |
| 743 | 11 | 71814143 | 71814284 | −0.1502715 | 0.150272 |
| 744 | 2 | 26569043 | 26569180 | 0.15015322 | 0.150153222 |
| 745 | 16 | 58163124 | 58163437 | 0.14947825 | 0.14947825 |
| 746 | 6 | 100036716 | 100036860 | 0.14945169 | 0.149451692 |
| 747 | 4 | 120548520 | 120548689 | 0.14886801 | 0.148868013 |
| 748 | 4 | 2395700 | 2395842 | 0.14876985 | 0.148769852 |
| 749 | 5 | 16466251 | 16466390 | 0.1487424 | 0.148742395 |
| 750 | 17 | 79269279 | 79269553 | 0.14712416 | 0.147124156 |
| 751 | 2 | 237072323 | 237072954 | −0.1466052 | 0.146605 |
| 752 | 7 | 38346718 | 38346878 | −0.1465019 | 0.146502 |
| 753 | 19 | 44809119 | 44809294 | −0.1463524 | 0.146352 |
| 754 | 8 | 82754015 | 82754165 | 0.14630639 | 0.146306387 |
| 755 | 2 | 73143215 | 73143394 | 0.14619245 | 0.146192454 |
| 756 | 1 | 91184429 | 91185043 | −0.1461653 | 0.146165 |
| 757 | 16 | 85588585 | 85588724 | 0.14612756 | 0.146127562 |
| 758 | 18 | 42339153 | 42339337 | 0.14516184 | 0.14516184 |
| 759 | 16 | 53737996 | 53738251 | 0.14490709 | 0.144907086 |
| 760 | 8 | 143750782 | 143750918 | 0.14468827 | 0.144688271 |
| 761 | 12 | 69863934 | 69864144 | −0.1445492 | 0.144549 |
| 762 | 17 | 4607145 | 4607287 | 0.14432771 | 0.144327707 |
| 763 | 6 | 32805926 | 32806073 | −0.1441882 | 0.144188 |
| 764 | 7 | 87505057 | 87505259 | 0.14413904 | 0.144139045 |
| 765 | 12 | 122277445 | 122277586 | −0.1440071 | 0.144007 |
| 766 | 3 | 15469306 | 15469457 | 0.14369601 | 0.143696006 |
| 767 | 1 | 91188844 | 91189889 | −0.1436102 | 0.14361 |
| 768 | 1 | 151584579 | 151584830 | −0.1434694 | 0.143469 |
| 769 | 2 | 241560947 | 241561325 | −0.143447 | 0.143447 |
| 770 | 5 | 87955336 | 87955529 | 0.14327831 | 0.143278313 |
| 771 | 7 | 158622788 | 158622930 | 0.14310712 | 0.143107116 |
| 772 | 20 | 42875703 | 42875826 | 0.14309651 | 0.143096507 |
| 773 | 6 | 146136362 | 146136500 | −0.142609 | 0.142609 |
| 774 | 20 | 44519861 | 44520264 | 0.14179525 | 0.141795255 |
| 775 | 20 | 4666672 | 4666832 | −0.1409467 | 0.140947 |
| 776 | 14 | 70721563 | 70721663 | −0.1404319 | 0.140432 |
| 777 | 1 | 192777808 | 192778243 | 0.13975708 | 0.13975708 |
| 778 | 17 | 4981523 | 4981694 | 0.13947292 | 0.139472916 |
| 779 | 19 | 12896948 | 12897219 | 0.13939583 | 0.13939583 |
| 780 | 16 | 58060500 | 58060652 | −0.1391027 | 0.139103 |
| 781 | 6 | 10423476 | 10423737 | −0.1389183 | 0.138918 |
| 782 | 15 | 45427318 | 45427903 | −0.1389019 | 0.138902 |
| 783 | 6 | 24774908 | 24775041 | 0.13855897 | 0.138558971 |
| 784 | 2 | 242575780 | 242575919 | −0.13848 | 0.13848 |
| 785 | 10 | 72164058 | 72164204 | −0.1379511 | 0.137951 |
| 786 | 4 | 184328243 | 184328528 | 0.13790585 | 0.13790585 |
| 787 | 6 | 37515404 | 37515553 | −0.1378394 | 0.137839 |
| 788 | 7 | 98477652 | 98477790 | −0.1378335 | 0.137834 |
| 789 | 2 | 128848638 | 128849039 | 0.13771356 | 0.137713562 |
| 790 | 2 | 160918606 | 160918702 | 0.13770678 | 0.13770678 |
| 791 | 2 | 73518582 | 73519190 | −0.1369057 | 0.136906 |
| 792 | 6 | 42013271 | 42013411 | 0.13648958 | 0.136489576 |
| 793 | 2 | 95831341 | 95831484 | −0.13629 | 0.13629 |
| 794 | 19 | 50370422 | 50370557 | −0.1360876 | 0.136088 |
| 795 | 2 | 12628634 | 12628768 | 0.13581945 | 0.135819449 |
| 796 | 19 | 9938784 | 9938932 | 0.13562818 | 0.135628184 |
| 797 | 11 | 65101083 | 65101252 | 0.13556468 | 0.135564681 |
| 798 | 12 | 32552448 | 32552599 | 0.13545152 | 0.135451524 |
| 799 | 5 | 176449540 | 176449712 | 0.13464975 | 0.134649749 |
| 800 | 2 | 219575919 | 219576066 | 0.13444574 | 0.134445743 |
| 801 | 4 | 6576506 | 6576641 | −0.1340184 | 0.134018 |
| 802 | 19 | 58095392 | 58095539 | 0.13327157 | 0.133271567 |
| 803 | 20 | 54967297 | 54967580 | −0.133218 | 0.133218 |
| 804 | 17 | 78518799 | 78518946 | 0.13238008 | 0.132380079 |
| 805 | 15 | 91565536 | 91565682 | −0.1321109 | 0.132111 |
| 806 | 4 | 56915249 | 56915430 | 0.1320345 | 0.132034499 |
| 807 | 16 | 73126297 | 73126437 | 0.13165564 | 0.131655645 |
| 808 | 3 | 188850124 | 188850283 | 0.13070056 | 0.130700561 |
| 809 | 16 | 67203657 | 67204055 | −0.1306677 | 0.130668 |
| 810 | 14 | 70234664 | 70234811 | −0.1302922 | 0.130292 |
| 811 | 16 | 86774488 | 86774640 | 0.13007555 | 0.13007555 |
| 812 | 2 | 64681656 | 64681817 | −0.130035 | 0.130035 |
| 813 | 2 | 101618490 | 101618680 | 0.13000554 | 0.130005539 |
| 814 | 2 | 177016387 | 177016779 | −0.1298799 | 0.12988 |
| 815 | 14 | 21945226 | 21945492 | 0.12982989 | 0.129829885 |
| 816 | 10 | 51827577 | 51827821 | 0.12974118 | 0.129741178 |
| 817 | 3 | 169482642 | 169482783 | 0.12882668 | 0.128826678 |
| 818 | 11 | 3078187 | 3078333 | −0.1286171 | 0.128617 |
| 819 | 1 | 76540039 | 76540251 | 0.12846959 | 0.128469591 |
| 820 | 11 | 75236534 | 75236682 | 0.12823489 | 0.128234891 |
| 821 | 11 | 32851454 | 32851596 | −0.1282283 | 0.128228 |
| 822 | 2 | 219857713 | 219857996 | −0.1278666 | 0.127867 |
| 823 | 9 | 98789651 | 98790177 | −0.1278582 | 0.127858 |
| 824 | 4 | 83206036 | 83206185 | −0.1274593 | 0.127459 |
| 825 | 18 | 5237750 | 5238004 | 0.12736674 | 0.127366735 |
| 826 | 1 | 63782900 | 63783244 | 0.12686329 | 0.126863289 |
| 827 | 8 | 125740038 | 125740190 | 0.12673773 | 0.126737729 |
| 828 | 17 | 39968758 | 39968923 | 0.12657848 | 0.126578481 |
| 829 | 1 | 101644777 | 101645032 | 0.12616317 | 0.126163171 |
| 830 | 5 | 71616384 | 71616590 | 0.12573497 | 0.125734967 |
| 831 | 6 | 50674575 | 50674711 | −0.125283 | 0.125283 |
| 832 | 11 | 71950848 | 71950992 | −0.1251196 | 0.12512 |
| 833 | 10 | 82422790 | 82422933 | −0.1247334 | 0.124733 |
| 834 | 11 | 63258646 | 63258849 | −0.1247233 | 0.124723 |
| 835 | 2 | 214016862 | 214017019 | −0.1246401 | 0.12464 |
| 836 | 17 | 7155819 | 7155976 | −0.124618 | 0.124618 |
| 837 | 5 | 139283003 | 139283434 | −0.1245982 | 0.124598 |
| 838 | 3 | 13526705 | 13526888 | −0.1243574 | 0.124357 |
| 839 | 6 | 33280439 | 33280590 | −0.1240049 | 0.124005 |
| 840 | 12 | 89745594 | 89745748 | 0.12393337 | 0.123933369 |
| 841 | 1 | 100503688 | 100503829 | 0.12368455 | 0.123684553 |
| 842 | 7 | 102105562 | 102105719 | −0.1236018 | 0.123602 |
| 843 | 6 | 111197755 | 111197920 | 0.12353636 | 0.123536358 |
| 844 | 21 | 45136852 | 45136994 | 0.12338136 | 0.123381362 |
| 845 | 12 | 21590384 | 21590626 | 0.12333802 | 0.12333802 |
| 846 | 22 | 19748306 | 19748478 | 0.12328302 | 0.123283018 |
| 847 | 11 | 9336283 | 9336422 | −0.123256 | 0.123256 |
| 848 | 7 | 139025936 | 139026059 | −0.1226469 | 0.122647 |
| 849 | 8 | 143556669 | 143556806 | 0.12244968 | 0.122449678 |
| 850 | 6 | 85483884 | 85484642 | −0.1224481 | 0.122448 |
| 851 | 12 | 7052954 | 7053099 | −0.1223402 | 0.12234 |
| 852 | 7 | 76751663 | 76751919 | −0.1221124 | 0.122112 |
| 853 | 1 | 161369572 | 161369715 | 0.1219004 | 0.121900396 |
| 854 | 3 | 121553857 | 121554107 | 0.1214881 | 0.121488104 |
| 855 | 9 | 33446395 | 33446544 | −0.1214289 | 0.121429 |
| 856 | 5 | 176944005 | 176944215 | 0.12141007 | 0.121410074 |
| 857 | 16 | 10408906 | 10409054 | −0.1213667 | 0.121367 |
| 858 | X | 153267714 | 153268238 | 0.12136481 | 0.121364813 |
| 859 | 19 | 12777638 | 12777851 | 0.12134619 | 0.121346187 |
| 860 | 19 | 44668938 | 44669098 | −0.1212488 | 0.121249 |
| 861 | 8 | 37963228 | 37963273 | −0.1211178 | 0.121118 |
| 862 | 1 | 222884832 | 222884982 | 0.12091788 | 0.120917881 |
| 863 | 10 | 133741792 | 133742221 | −0.1208671 | 0.120867 |
| 864 | 12 | 25204260 | 25204403 | −0.1207576 | 0.120758 |
| 865 | 6 | 26027085 | 26027253 | 0.12062112 | 0.120621125 |
| 866 | 22 | 51222453 | 51222578 | 0.12049232 | 0.120492325 |
| 867 | 17 | 41322335 | 41322548 | 0.12017179 | 0.120171795 |
| 868 | 1 | 46806279 | 46806458 | 0.120127 | 0.120127001 |
| 869 | 3 | 142442839 | 142443020 | 0.1198196 | 0.119819599 |
| 870 | X | 68114474 | 68114653 | 0.11981341 | 0.119813414 |
| 871 | 1 | 78148299 | 78148596 | −0.1197711 | 0.119771 |
| 872 | 2 | 161263785 | 161263916 | 0.11960592 | 0.119605918 |
| 873 | 4 | 71600765 | 71600909 | −0.1193453 | 0.119345 |
| 874 | 16 | 451993 | 452130 | −0.1192503 | 0.11925 |
| 875 | 1 | 40204582 | 40204739 | 0.11915537 | 0.119155369 |
| 876 | 7 | 116962669 | 116964905 | −0.1189969 | 0.118997 |
| 877 | 6 | 143234720 | 143234854 | 0.11874702 | 0.118747019 |
| 878 | 10 | 99080324 | 99080913 | −0.1184319 | 0.118432 |
| 879 | 10 | 79793574 | 79793729 | 0.11835143 | 0.118351427 |
| 880 | 7 | 5553557 | 5553693 | 0.11820588 | 0.118205885 |
| 881 | 9 | 84270958 | 84271103 | −0.1179849 | 0.117985 |
| 882 | 8 | 100905357 | 100905487 | 0.11777037 | 0.117770375 |
| 883 | 19 | 41854800 | 41854983 | 0.11771923 | 0.117719229 |
| 884 | 6 | 30029414 | 30029587 | 0.11768694 | 0.117686938 |
| 885 | 3 | 57541673 | 57541890 | 0.11752622 | 0.117526216 |
| 886 | 20 | 48532138 | 48532394 | −0.1174388 | 0.117439 |
| 887 | 16 | 451428 | 451708 | −0.1174046 | 0.117405 |
| 888 | 15 | 75230517 | 75230701 | −0.1173994 | 0.117399 |
| 889 | 1 | 161102480 | 161102626 | −0.1171478 | 0.117148 |
| 890 | 12 | 67662645 | 67662823 | −0.1170974 | 0.117097 |
| 891 | 7 | 37960824 | 37960986 | 0.11682447 | 0.116824474 |
| 892 | X | 20339054 | 20339240 | 0.11673296 | 0.116732964 |
| 893 | 16 | 1660498 | 1660645 | −0.1164754 | 0.116475 |
| 894 | 12 | 109250908 | 109251054 | −0.1162987 | 0.116299 |
| 895 | 14 | 24605487 | 24605591 | 0.11591612 | 0.115916117 |
| 896 | 1 | 17512818 | 17513008 | 0.11581692 | 0.115816921 |
| 897 | 3 | 185655718 | 185656035 | −0.115799 | 0.115799 |
| 898 | 20 | 44519316 | 44519476 | −0.1157608 | 0.115761 |
| 899 | 14 | 22887607 | 22887755 | −0.1157445 | 0.115744 |
| 900 | 1 | 236304934 | 236305072 | −0.1156777 | 0.115678 |
| 901 | 4 | 15767705 | 15768031 | −0.1156498 | 0.11565 |
| 902 | 11 | 57227277 | 57227425 | 0.11530581 | 0.115305807 |
| 903 | 2 | 85766036 | 85766490 | 0.11509756 | 0.115097559 |
| 904 | 2 | 178483332 | 178483482 | −0.1149567 | 0.114957 |
| 905 | 5 | 134366328 | 134367457 | −0.1147255 | 0.114725 |
| 906 | 5 | 1930850 | 1930994 | −0.1146585 | 0.114658 |
| 907 | 17 | 64961370 | 64961612 | 0.11459996 | 0.114599963 |
| 908 | 3 | 156806674 | 156806809 | 0.11450139 | 0.114501391 |
| 909 | 3 | 155524116 | 155524263 | 0.11432856 | 0.114328559 |
| 910 | 7 | 108097108 | 108097251 | −0.1142278 | 0.114228 |
| 911 | 11 | 64084959 | 64085217 | 0.11405017 | 0.114050173 |
| 912 | 2 | 118979663 | 118979807 | −0.1139456 | 0.113946 |
| 913 | 11 | 101980955 | 101981204 | 0.11391098 | 0.113910982 |
| 914 | 13 | 107220517 | 107220657 | −0.1137524 | 0.113752 |
| 915 | 7 | 852958 | 853104 | 0.11349834 | 0.113498336 |
| 916 | 2 | 64938486 | 64938679 | −0.1134705 | 0.113471 |
| 917 | 16 | 3661412 | 3661546 | 0.11340323 | 0.113403227 |
| 918 | 1 | 151763787 | 151763946 | 0.11337329 | 0.113373288 |
| 919 | 19 | 7197170 | 7197414 | 0.11326876 | 0.11326876 |
| 920 | 2 | 55646906 | 55647063 | 0.11315296 | 0.113152958 |
| 921 | 9 | 80911981 | 80912122 | −0.112287 | 0.112287 |
| 922 | 22 | 25817189 | 25817337 | 0.11211234 | 0.112112344 |
| 923 | 12 | 121905459 | 121905602 | −0.1120563 | 0.112056 |
| 924 | 14 | 42074796 | 42075440 | −0.1120107 | 0.112011 |
| 925 | 6 | 40555653 | 40555792 | −0.1119887 | 0.111989 |
| 926 | 5 | 180650883 | 180651124 | −0.1118581 | 0.111858 |
| 927 | 12 | 51441983 | 51442155 | 0.11176571 | 0.111765708 |
| 928 | 9 | 70971499 | 70972367 | −0.1117505 | 0.11175 |
| 929 | 3 | 197476483 | 197476659 | 0.11136297 | 0.111362972 |
| 930 | 16 | 57126657 | 57126798 | −0.111072 | 0.111072 |
| 931 | 6 | 50805702 | 50806108 | −0.1110597 | 0.11106 |
| 932 | 11 | 95524257 | 95524398 | −0.1108722 | 0.110872 |
| 933 | 5 | 177632188 | 177632328 | −0.1105156 | 0.110516 |
| 934 | 20 | 17950869 | 17951008 | 0.11051233 | 0.110512325 |
| 935 | 3 | 33759748 | 33759897 | 0.11039502 | 0.110395017 |
| 936 | 8 | 55770758 | 55770887 | 0.10992529 | 0.109925294 |
| 937 | 22 | 17850360 | 17850515 | 0.10968743 | 0.109687435 |
| 938 | 17 | 28256514 | 28256646 | −0.1095637 | 0.109564 |
| 939 | 15 | 59063100 | 59063452 | 0.10947346 | 0.109473465 |
| 940 | 6 | 27637121 | 27637625 | −0.1094128 | 0.109413 |
| 941 | 7 | 149470205 | 149470403 | 0.10935313 | 0.109353129 |
| 942 | 11 | 77790772 | 77790918 | 0.10897854 | 0.108978536 |
| 943 | 1 | 180206299 | 180206495 | 0.10855797 | 0.108557974 |
| 944 | 1 | 181452682 | 181452959 | −0.1085418 | 0.108542 |
| 945 | 7 | 2727685 | 2727851 | −0.1080897 | 0.10809 |
| 946 | 13 | 31192009 | 31192148 | 0.10804634 | 0.108046341 |
| 947 | 17 | 67410659 | 67410869 | 0.1079289 | 0.107928896 |
| 948 | 5 | 40835114 | 40835376 | 0.10790229 | 0.107902292 |
| 949 | 7 | 149412213 | 149412361 | 0.1079018 | 0.107901799 |
| 950 | 5 | 2762209 | 2762356 | 0.10783115 | 0.107831155 |
| 951 | 19 | 10342107 | 10342305 | −0.1078061 | 0.107806 |
| 952 | 2 | 95787825 | 95788018 | −0.1077596 | 0.10776 |
| 953 | 1 | 93544930 | 93545068 | 0.10775551 | 0.107755507 |
| 954 | 1 | 239549548 | 239549682 | 0.10730266 | 0.107302664 |
| 955 | 3 | 52804829 | 52804981 | −0.1072624 | 0.107262 |
| 956 | 1 | 230203924 | 230204064 | 0.10724358 | 0.107243577 |
| 957 | 17 | 18087179 | 18087323 | −0.1072414 | 0.107241 |
| 958 | 7 | 27135043 | 27135318 | −0.1070958 | 0.107096 |
| 959 | 21 | 35014116 | 35014429 | −0.1070592 | 0.107059 |
| 960 | 8 | 21988068 | 21988227 | −0.1069173 | 0.106917 |
| 961 | 1 | 26249270 | 26249453 | 0.10669795 | 0.106697951 |
| 962 | 4 | 154388305 | 154388448 | −0.1066182 | 0.106618 |
| 963 | 8 | 122654157 | 122654305 | 0.10658841 | 0.106588406 |
| 964 | 6 | 41168492 | 41168819 | 0.10656172 | 0.106561723 |
| 965 | 18 | 74204060 | 74204205 | 0.10652318 | 0.106523178 |
| 966 | 6 | 108487080 | 108487227 | 0.10648506 | 0.106485064 |
| 967 | 15 | 97436519 | 97436677 | −0.1064841 | 0.106484 |
| 968 | 15 | 79102928 | 79103080 | 0.10645644 | 0.10645644 |
| 969 | X | 153946154 | 153946323 | 0.10643479 | 0.106434792 |
| 970 | 1 | 231229107 | 231229256 | 0.10619396 | 0.106193958 |
| 971 | 1 | 6520581 | 6520907 | 0.10619296 | 0.106192963 |
| 972 | 22 | 32870973 | 32871111 | −0.1061425 | 0.106143 |
| 973 | 10 | 70091663 | 70091940 | 0.10589077 | 0.105890771 |
| 974 | 12 | 56325659 | 56325934 | −0.1056662 | 0.105666 |
| 975 | 6 | 56708952 | 56709102 | 0.10560383 | 0.105603832 |
| 976 | 16 | 30904782 | 30905068 | −0.1053534 | 0.105353 |
| 977 | 11 | 110584009 | 110584151 | −0.1052921 | 0.105292 |
| 978 | 5 | 143549944 | 143550202 | 0.1051967 | 0.105196703 |
| 979 | 17 | 55334943 | 55335129 | 0.10504211 | 0.105042111 |
| 980 | 9 | 117350156 | 117350294 | −0.1048804 | 0.10488 |
| 981 | 17 | 18684358 | 18684681 | −0.1048608 | 0.104861 |
| 982 | 14 | 51410609 | 51410753 | −0.104763 | 0.104763 |
| 983 | 1 | 41444792 | 41444927 | 0.10468079 | 0.104680795 |
| 984 | 3 | 44803015 | 44803415 | 0.10463122 | 0.104631223 |
| 985 | 15 | 40213198 | 40213413 | −0.1043272 | 0.104327 |
| 986 | 6 | 30457994 | 30458075 | −0.1042948 | 0.104295 |
| 987 | 18 | 56939043 | 56940431 | −0.1040079 | 0.104008 |
| 988 | 8 | 141520793 | 141520975 | −0.1039451 | 0.103945 |
| 989 | 4 | 141072572 | 141072713 | 0.10391466 | 0.103914662 |
| 990 | 17 | 47785514 | 47785727 | −0.1039097 | 0.10391 |
| 991 | 10 | 72200348 | 72200698 | 0.10382647 | 0.103826468 |
| 992 | 16 | 53538124 | 53538330 | −0.1037344 | 0.103734 |
| 993 | 13 | 112728135 | 112728267 | −0.103697 | 0.103697 |
| 994 | 17 | 1466224 | 1466357 | 0.10368673 | 0.10368673 |
| 995 | 13 | 20356027 | 20356297 | 0.10366154 | 0.103661537 |
| 996 | 2 | 198171461 | 198171671 | −0.1035648 | 0.103565 |
| 997 | 11 | 130318636 | 130318788 | 0.10330692 | 0.103306917 |
| 998 | 7 | 130641546 | 130641758 | −0.1032724 | 0.103272 |
| 999 | 16 | 74402267 | 74402397 | 0.10319866 | 0.103198659 |
| 1000 | 19 | 52207515 | 52207664 | 0.10317564 | 0.103175643 |
| 1001 | 6 | 139601021 | 139601152 | 0.10316087 | 0.103160868 |
| 1002 | 18 | 54318585 | 54318734 | 0.10315762 | 0.103157621 |
| 1003 | 15 | 50646547 | 50646686 | 0.10284302 | 0.102843016 |
| 1004 | 1 | 171454757 | 171454898 | 0.10269782 | 0.102697823 |
| 1005 | 1 | 202776220 | 202776375 | 0.10259548 | 0.102595476 |
| 1006 | 19 | 41168937 | 41169082 | 0.10235072 | 0.10235072 |
| 1007 | 18 | 43266937 | 43267112 | −0.1023217 | 0.102322 |
| 1008 | 19 | 9695118 | 9695495 | −0.1021837 | 0.102184 |
| 1009 | 12 | 6961354 | 6961501 | 0.1021795 | 0.1021795 |
| 1010 | 12 | 57630785 | 57630922 | 0.10198885 | 0.101988855 |
| 1011 | 1 | 38229995 | 38230146 | −0.1018923 | 0.101892 |
| 1012 | 5 | 95997645 | 95997793 | 0.10178791 | 0.101787912 |
| 1013 | 3 | 9932664 | 9932811 | −0.1017368 | 0.101737 |
| 1014 | 8 | 101964064 | 101964220 | −0.1015481 | 0.101548 |
| 1015 | 4 | 186125264 | 186125400 | −0.1014876 | 0.101488 |
| 1016 | 2 | 198363789 | 198363943 | 0.10137944 | 0.101379439 |
| 1017 | 11 | 75081228 | 75081328 | 0.10134292 | 0.101342915 |
| 1018 | 11 | 65430458 | 65430608 | −0.1013208 | 0.101321 |
| 1019 | 15 | 76629033 | 76629178 | −0.1012398 | 0.10124 |
| 1020 | 6 | 16761862 | 16761976 | −0.1012321 | 0.101232 |
| 1021 | 1 | 152009173 | 152009323 | 0.10119709 | 0.101197093 |
| 1022 | 19 | 42760125 | 42760264 | −0.1007193 | 0.100719 |
| 1023 | 4 | 140477990 | 140478138 | 0.10042029 | 0.10042029 |
| 1024 | 5 | 133512489 | 133512637 | 0.10035109 | 0.100351086 |
| 1025 | 2 | 119603135 | 119604030 | −0.1002669 | 0.100267 |
| 1026 | 1 | 160001599 | 160001743 | 0.10013455 | 0.100134552 |
| 1027 | 17 | 27276352 | 27276483 | 0.09995143 | 0.099951427 |
| 1028 | 4 | 3076181 | 3076501 | −0.0997694 | 0.0997694 |
| 1029 | 10 | 71906506 | 71906645 | 0.09966724 | 0.099667244 |
| 1030 | 20 | 23331190 | 23331425 | 0.09942722 | 0.099427225 |
| 1031 | 7 | 128694318 | 128694458 | 0.0992848 | 0.099284801 |
| 1032 | 6 | 26457933 | 26458095 | −0.0992047 | 0.0992047 |
| 1033 | 2 | 10521826 | 10521973 | −0.0992001 | 0.0992001 |
| 1034 | 15 | 23034624 | 23034732 | 0.09885296 | 0.098852964 |
| 1035 | 12 | 511285 | 511431 | −0.09867 | 0.09867 |
| 1036 | 2 | 175351569 | 175351711 | −0.0986695 | 0.0986695 |
| 1037 | 1 | 197871760 | 197871898 | 0.09846877 | 0.098468773 |
| 1038 | 2 | 43453172 | 43453313 | −0.0983586 | 0.0983586 |
| 1039 | 4 | 175133073 | 175133211 | 0.09832648 | 0.098326482 |
| 1040 | 13 | 25875576 | 25875712 | −0.0982662 | 0.0982662 |
| 1041 | 1 | 202113996 | 202114142 | −0.098232 | 0.098232 |
| 1042 | 1 | 161129109 | 161129305 | −0.0982291 | 0.0982291 |
| 1043 | 6 | 26032330 | 26032475 | −0.0981582 | 0.0981582 |
| 1044 | 5 | 98109273 | 98109546 | 0.09792185 | 0.097921851 |
| 1045 | 8 | 144766764 | 144766910 | −0.097865 | 0.097865 |
| 1046 | 2 | 85108922 | 85109077 | 0.09745219 | 0.097452191 |
| 1047 | 2 | 64879836 | 64879977 | −0.0972865 | 0.0972865 |
| 1048 | 1 | 92350968 | 92351112 | 0.0972541 | 0.097254097 |
| 1049 | 1 | 226616927 | 226617069 | 0.09720921 | 0.097209207 |
| 1050 | 2 | 203130824 | 203130958 | 0.09715281 | 0.097152807 |
| 1051 | 9 | 139237325 | 139237448 | −0.0970797 | 0.0970797 |
| 1052 | 8 | 23315218 | 23315512 | 0.09704102 | 0.097041022 |
| 1053 | X | 80457926 | 80458088 | 0.09695349 | 0.096953492 |
| 1054 | 6 | 17280936 | 17281080 | −0.09681 | 0.09681 |
| 1055 | 15 | 80263299 | 80263450 | −0.0968037 | 0.0968037 |
| 1056 | 4 | 100738611 | 100738763 | 0.09674485 | 0.096744854 |
| 1057 | 2 | 27273349 | 27273490 | 0.09661245 | 0.096612453 |
| 1058 | 2 | 55496315 | 55496623 | 0.09641874 | 0.096418739 |
| 1059 | 7 | 140624825 | 140624975 | 0.09634679 | 0.096346794 |
| 1060 | 17 | 59940817 | 59940973 | 0.09591605 | 0.095916054 |
| 1061 | 4 | 146019259 | 146019452 | −0.095827 | 0.095827 |
| 1062 | 9 | 126101324 | 126101536 | 0.09567192 | 0.095671924 |
| 1063 | 4 | 183838657 | 183838840 | 0.09562944 | 0.095629437 |
| 1064 | 5 | 172669683 | 172670005 | −0.0954449 | 0.0954449 |
| 1065 | 16 | 73097234 | 73097648 | −0.0954079 | 0.0954079 |
| 1066 | 4 | 149363835 | 149363983 | −0.0953724 | 0.0953724 |
| 1067 | 12 | 8850653 | 8850775 | 0.09530967 | 0.095309668 |
| 1068 | 1 | 84764533 | 84764783 | 0.09508619 | 0.095086189 |
| 1069 | 2 | 176032435 | 176032658 | 0.09503209 | 0.095032089 |
| 1070 | 14 | 74226484 | 74226631 | 0.09486247 | 0.094862469 |
| 1071 | 4 | 85414011 | 85414381 | 0.09486113 | 0.094861127 |
| 1072 | 9 | 86152447 | 86153869 | −0.094802 | 0.094802 |
| 1073 | 12 | 121018942 | 121019093 | 0.09473782 | 0.094737823 |
| 1074 | 12 | 58013400 | 58013718 | −0.0945687 | 0.0945687 |
| 1075 | 17 | 80256254 | 80256595 | −0.0944905 | 0.0944905 |
| 1076 | 2 | 175458489 | 175458646 | 0.09433695 | 0.094336951 |
| 1077 | 11 | 66405841 | 66406045 | −0.0942587 | 0.0942587 |
| 1078 | 17 | 61851923 | 61852077 | −0.094239 | 0.094239 |
| 1079 | 1 | 234508974 | 234509543 | 0.09397546 | 0.09397546 |
| 1080 | 3 | 196359592 | 196359737 | 0.09392093 | 0.093920931 |
| 1081 | 1 | 156406440 | 156406799 | 0.09389821 | 0.093898214 |
| 1082 | 16 | 11759198 | 11759395 | 0.09389122 | 0.093891221 |
| 1083 | 4 | 27086368 | 27086638 | 0.09384664 | 0.093846637 |
| 1084 | 10 | 64564399 | 64564480 | −0.0938353 | 0.0938353 |
| 1085 | 6 | 82462175 | 82462312 | 0.09378751 | 0.093787512 |
| 1086 | 2 | 109210727 | 109211004 | 0.09363913 | 0.093639131 |
| 1087 | 5 | 130588789 | 130588966 | 0.09356869 | 0.093568686 |
| 1088 | 17 | 45056252 | 45056398 | −0.0933912 | 0.0933912 |
| 1089 | 22 | 38379673 | 38379816 | 0.09336527 | 0.093365275 |
| 1090 | 3 | 134093486 | 134093610 | 0.09327979 | 0.093279791 |
| 1091 | 13 | 97762213 | 97762417 | −0.0930762 | 0.0930762 |
| 1092 | 12 | 27175768 | 27175901 | 0.0930646 | 0.093064596 |
| 1093 | 17 | 46124611 | 46124791 | −0.0930593 | 0.0930593 |
| 1094 | 11 | 8933293 | 8933440 | 0.09305281 | 0.093052814 |
| 1095 | 12 | 49246043 | 49246181 | 0.09300479 | 0.093004791 |
| 1096 | 2 | 120124204 | 120124361 | 0.0929517 | 0.092951703 |
| 1097 | 2 | 26568388 | 26568535 | −0.0927396 | 0.0927396 |
| 1098 | 19 | 41035106 | 41035222 | −0.0926829 | 0.0926829 |
| 1099 | 11 | 31846277 | 31846608 | 0.09233816 | 0.092338161 |
| 1100 | 14 | 77648120 | 77648306 | 0.09228743 | 0.092287434 |
| 1101 | 6 | 132722237 | 132722384 | 0.09219349 | 0.092193491 |
| 1102 | 11 | 65029303 | 65029551 | 0.09211597 | 0.092115973 |
| 1103 | 2 | 73441631 | 73441762 | −0.0920575 | 0.0920575 |
| 1104 | 19 | 38397559 | 38397955 | 0.09203212 | 0.092032117 |
| 1105 | 19 | 15342680 | 15342815 | 0.09200319 | 0.092003192 |
| 1106 | 4 | 57843933 | 57844079 | −0.0918337 | 0.0918337 |
| 1107 | 8 | 41348409 | 41348554 | −0.0917623 | 0.0917623 |
| 1108 | 9 | 113800211 | 113800352 | −0.0915459 | 0.0915459 |
| 1109 | 9 | 119721297 | 119721565 | −0.0915334 | 0.0915334 |
| 1110 | 16 | 70284848 | 70284993 | −0.0912536 | 0.0912536 |
| 1111 | 22 | 34188961 | 34189150 | −0.0912418 | 0.0912418 |
| 1112 | 22 | 46299291 | 46299426 | −0.0910762 | 0.0910762 |
| 1113 | 14 | 66975221 | 66975373 | 0.09091819 | 0.090918193 |
| 1114 | 14 | 91575396 | 91575550 | −0.0908186 | 0.0908186 |
| 1115 | 8 | 104311272 | 104311409 | −0.0907228 | 0.0907228 |
| 1116 | 13 | 28025129 | 28025381 | 0.09053433 | 0.090534326 |
| 1117 | 18 | 10379179 | 10379396 | 0.09053103 | 0.090531027 |
| 1118 | 8 | 37887633 | 37887778 | −0.0905308 | 0.0905308 |
| 1119 | 19 | 50836522 | 50836639 | 0.09042155 | 0.090421548 |
| 1120 | 6 | 146285272 | 146285413 | 0.0901911 | 0.090191096 |
| 1121 | 6 | 164077920 | 164078085 | −0.0901833 | 0.0901833 |
| 1122 | 6 | 42858622 | 42858772 | 0.09017961 | 0.090179608 |
| 1123 | 1 | 197882278 | 197882371 | 0.09012776 | 0.090127756 |
| 1124 | 8 | 49577443 | 49577714 | 0.0899383 | 0.089938298 |
| 1125 | 12 | 108954188 | 108954345 | −0.0898893 | 0.0898893 |
| 1126 | 14 | 21081795 | 21081940 | 0.08986327 | 0.08986327 |
| 1127 | 1 | 226830883 | 226831026 | 0.08981544 | 0.089815437 |
| 1128 | 17 | 27054376 | 27054506 | 0.08968653 | 0.089686532 |
| 1129 | 16 | 1823966 | 1824109 | −0.0895844 | 0.0895844 |
| 1130 | 11 | 33037320 | 33037467 | −0.089582 | 0.089582 |
| 1131 | 17 | 26733223 | 26733445 | −0.0895731 | 0.0895731 |
| 1132 | 16 | 10946416 | 10946560 | 0.08932217 | 0.089322173 |
| 1133 | 6 | 29760330 | 29760487 | 0.08921485 | 0.089214845 |
| 1134 | 6 | 31461673 | 31461805 | 0.08921226 | 0.089212263 |
| 1135 | 2 | 45795143 | 45795285 | 0.08908486 | 0.089084861 |
| 1136 | 7 | 73021467 | 73021688 | −0.088997 | 0.088997 |
| 1137 | 1 | 17445850 | 17446097 | 0.08899651 | 0.088996515 |
| 1138 | 12 | 52345107 | 52345260 | 0.08882217 | 0.088822167 |
| 1139 | 22 | 18560560 | 18560756 | −0.088735 | 0.088735 |
| 1140 | 22 | 25800969 | 25801118 | 0.08856075 | 0.088560753 |
| 1141 | 15 | 65903246 | 65903549 | 0.08841214 | 0.088412136 |
| 1142 | 3 | 37034619 | 37034872 | −0.0884021 | 0.0884021 |
| 1143 | 18 | 49868052 | 49868196 | −0.0882821 | 0.0882821 |
| 1144 | 12 | 89745398 | 89745553 | −0.088223 | 0.088223 |
| 1145 | 19 | 33071615 | 33071751 | 0.08817966 | 0.088179664 |
| 1146 | 2 | 71132835 | 71133065 | −0.0879974 | 0.0879974 |
| 1147 | 3 | 37034268 | 37034416 | 0.08796628 | 0.087966275 |
| 1148 | 11 | 46264998 | 46265135 | −0.0879516 | 0.0879516 |
| 1149 | 6 | 37321576 | 37321756 | −0.0878804 | 0.0878804 |
| 1150 | 6 | 170151313 | 170151463 | 0.08787529 | 0.087875286 |
| 1151 | 2 | 242577080 | 242577229 | −0.0878273 | 0.0878273 |
| 1152 | 1 | 202830640 | 202830788 | 0.08777001 | 0.08777001 |
| 1153 | 1 | 94344091 | 94344241 | 0.08771363 | 0.08771363 |
| 1154 | 22 | 24093346 | 24093516 | 0.08765703 | 0.087657026 |
| 1155 | 13 | 22033074 | 22033224 | −0.0875513 | 0.0875513 |
| 1156 | 19 | 52772791 | 52772938 | 0.08752658 | 0.087526575 |
| 1157 | 5 | 96270850 | 96271406 | 0.08741236 | 0.087412364 |
| 1158 | 14 | 74220181 | 74220323 | −0.0873557 | 0.0873557 |
| 1159 | 1 | 91966897 | 91967031 | 0.08715328 | 0.087153281 |
| 1160 | 3 | 42641674 | 42641824 | −0.087074 | 0.087074 |
| 1161 | 17 | 76744733 | 76744890 | −0.0868355 | 0.0868355 |
| 1162 | 10 | 11220584 | 11220883 | −0.0868285 | 0.0868285 |
| 1163 | 1 | 21022910 | 21023059 | 0.08679873 | 0.086798728 |
| 1164 | 17 | 30264420 | 30264558 | 0.08676035 | 0.086760354 |
| 1165 | 3 | 160555464 | 160555623 | 0.08672866 | 0.086728657 |
| 1166 | 4 | 89080112 | 89080273 | 0.08667388 | 0.086673884 |
| 1167 | 3 | 49208831 | 49209075 | 0.08659727 | 0.086597273 |
| 1168 | 17 | 58678093 | 58678238 | 0.08658299 | 0.086582994 |
| 1169 | 21 | 46360274 | 46360523 | 0.08654014 | 0.086540141 |
| 1170 | 13 | 52585518 | 52585710 | −0.086501 | 0.086501 |
| 1171 | 18 | 47721153 | 47721298 | 0.08645755 | 0.086457552 |
| 1172 | 2 | 177502938 | 177503108 | 0.0864132 | 0.086413198 |
| 1173 | 1 | 161500533 | 161500755 | 0.08630859 | 0.086308585 |
| 1174 | 6 | 21587638 | 21587776 | 0.08628851 | 0.086288513 |
| 1175 | 1 | 44435536 | 44435683 | −0.0862853 | 0.0862853 |
| 1176 | 1 | 184724115 | 184724270 | −0.0862587 | 0.0862587 |
| 1177 | 13 | 98087314 | 98087462 | 0.08619268 | 0.086192679 |
| 1178 | 14 | 74226884 | 74227160 | 0.08593088 | 0.085930882 |
| 1179 | 5 | 42423998 | 42424155 | −0.0859134 | 0.0859134 |
| 1180 | 3 | 14220257 | 14220421 | 0.08578794 | 0.085787942 |
| 1181 | 1 | 227127937 | 227128110 | −0.0857376 | 0.0857376 |
| 1182 | 19 | 40931618 | 40931759 | 0.08569642 | 0.085696417 |
| 1183 | 17 | 45781653 | 45781828 | −0.0856921 | 0.0856921 |
| 1184 | 6 | 5260585 | 5260724 | 0.08555339 | 0.085553388 |
| 1185 | 12 | 7000724 | 7000872 | −0.0854119 | 0.0854119 |
| 1186 | 20 | 34207396 | 34207530 | 0.08539363 | 0.085393628 |
| 1187 | 12 | 51420267 | 51420409 | −0.0853106 | 0.0853106 |
| 1188 | 11 | 31832633 | 31832790 | −0.0851789 | 0.0851789 |
| 1189 | 2 | 26257374 | 26257515 | 0.08511268 | 0.085112675 |
| 1190 | 19 | 47363859 | 47364003 | −0.0848896 | 0.0848896 |
| 1191 | 6 | 143163603 | 143163787 | 0.08463122 | 0.084631225 |
| 1192 | 1 | 150947694 | 150947926 | −0.0845615 | 0.0845615 |
| 1193 | 14 | 52734279 | 52735795 | −0.084486 | 0.084486 |
| 1194 | 13 | 49549808 | 49549955 | −0.084431 | 0.084431 |
| 1195 | 11 | 117014646 | 117014894 | 0.08439352 | 0.084393516 |
| 1196 | 4 | 102268165 | 102268325 | 0.0843187 | 0.084318695 |
| 1197 | 2 | 152685017 | 152685311 | −0.0842916 | 0.0842916 |
| 1198 | 19 | 46996378 | 46996594 | −0.0841687 | 0.0841687 |
| 1199 | 10 | 94353703 | 94353827 | 0.0840386 | 0.084038596 |
| 1200 | 15 | 83680030 | 83680172 | −0.0836783 | 0.0836783 |
| 1201 | 14 | 64854495 | 64854665 | −0.0836314 | 0.0836314 |
| 1202 | 1 | 222791539 | 222791716 | −0.08332 | 0.08332 |
| 1203 | 16 | 2021800 | 2022155 | 0.08328386 | 0.083283856 |
| 1204 | 11 | 67252313 | 67252460 | 0.08321113 | 0.083211127 |
| 1205 | 6 | 99292714 | 99292858 | −0.083183 | 0.083183 |
| 1206 | 21 | 16437688 | 16437825 | −0.0831555 | 0.0831555 |
| 1207 | 3 | 48955944 | 48956095 | 0.0831361 | 0.083136096 |
| 1208 | 19 | 32532908 | 32533065 | 0.08298101 | 0.082981009 |
| 1209 | 19 | 55836654 | 55836810 | −0.082981 | 0.082981 |
| 1210 | 14 | 92338452 | 92338717 | −0.0829253 | 0.0829253 |
| 1211 | 3 | 194992564 | 194992710 | −0.082861 | 0.082861 |
| 1212 | 17 | 7760958 | 7761393 | 0.08279429 | 0.082794286 |
| 1213 | 1 | 714517 | 714607 | −0.0827102 | 0.0827102 |
| 1214 | 4 | 8271334 | 8271478 | −0.0826678 | 0.0826678 |
| 1215 | 15 | 78592235 | 78592340 | 0.08266035 | 0.082660352 |
| 1216 | 3 | 184099353 | 184099500 | 0.08234757 | 0.082347567 |
| 1217 | 9 | 126773802 | 126773950 | 0.08232316 | 0.082323164 |
| 1218 | 4 | 102711602 | 102712426 | 0.08230723 | 0.082307228 |
| 1219 | 7 | 26904081 | 26904262 | 0.08219771 | 0.08219771 |
| 1220 | 2 | 239288184 | 239288334 | −0.0821479 | 0.0821479 |
| 1221 | 1 | 114471726 | 114471902 | −0.0821278 | 0.0821278 |
| 1222 | 8 | 81786792 | 81786942 | 0.08210894 | 0.082108939 |
| 1223 | 17 | 4614581 | 4615022 | −0.0820247 | 0.0820247 |
| 1224 | 14 | 73392846 | 73393018 | 0.08199361 | 0.081993608 |
| 1225 | 10 | 105419967 | 105420222 | −0.0819922 | 0.0819922 |
| 1226 | 3 | 15468922 | 15469271 | 0.08194603 | 0.081946033 |
| 1227 | 11 | 62573017 | 62573167 | −0.0819262 | 0.0819262 |
| 1228 | 5 | 11384740 | 11385659 | −0.0819232 | 0.0819232 |
| 1229 | 14 | 32546870 | 32547002 | 0.08190177 | 0.081901765 |
| 1230 | 5 | 180688152 | 180688357 | −0.0818958 | 0.0818958 |
| 1231 | 6 | 31670440 | 31671422 | 0.08188283 | 0.081882832 |
| 1232 | 21 | 45209539 | 45209683 | 0.08178083 | 0.081780834 |
| 1233 | 2 | 20549696 | 20549851 | −0.0816044 | 0.0816044 |
| 1234 | 2 | 15829630 | 15829773 | 0.0816002 | 0.081600204 |
| 1235 | 4 | 57666311 | 57666455 | 0.08151527 | 0.081515274 |
| 1236 | 12 | 107487286 | 107487473 | −0.0811945 | 0.0811945 |
| 1237 | 5 | 43556284 | 43556425 | 0.08116224 | 0.081162239 |
| 1238 | 1 | 167189720 | 167189754 | 0.08111246 | 0.081112461 |
| 1239 | 11 | 104034541 | 104034818 | −0.0811106 | 0.0811106 |
| 1240 | 11 | 9635810 | 9635957 | −0.0808309 | 0.0808309 |
| 1241 | 4 | 153456067 | 153456217 | 0.08080534 | 0.080805337 |
| 1242 | 1 | 46598680 | 46598858 | −0.0807009 | 0.0807009 |
| 1243 | 2 | 63278100 | 63278255 | 0.08061692 | 0.080616922 |
| 1244 | 10 | 18947784 | 18947918 | 0.0804209 | 0.080420897 |
| 1245 | 6 | 27145497 | 27145641 | −0.0804162 | 0.0804162 |
| 1246 | 6 | 41605266 | 41605411 | −0.0804041 | 0.0804041 |
| 1247 | 17 | 6946584 | 6947623 | −0.0803045 | 0.0803045 |
| 1248 | 7 | 100887632 | 100887775 | −0.0802643 | 0.0802643 |
| 1249 | 3 | 147126883 | 147127174 | −0.0802162 | 0.0802162 |
| 1250 | 6 | 147851408 | 147851691 | −0.0801764 | 0.0801764 |
| 1251 | 1 | 70876725 | 70877040 | 0.08008784 | 0.080087843 |
| 1252 | 10 | 77846404 | 77846930 | 0.08000145 | 0.080001453 |
| 1253 | 12 | 54145351 | 54145557 | 0.07996224 | 0.079962243 |
| 1254 | 4 | 153700812 | 153700956 | −0.0799126 | 0.0799126 |
| 1255 | 10 | 104406579 | 104406716 | −0.0797627 | 0.0797627 |
| 1256 | 2 | 196521423 | 196521568 | 0.07973329 | 0.079733294 |
| 1257 | 12 | 3600588 | 3600750 | 0.07956353 | 0.079563528 |
| 1258 | 3 | 113557586 | 113557716 | −0.0795496 | 0.0795496 |
| 1259 | 1 | 87380815 | 87381029 | 0.07954435 | 0.079544345 |
| 1260 | 12 | 54360613 | 54360724 | −0.0795332 | 0.0795332 |
| 1261 | 22 | 46731152 | 46731332 | 0.07942948 | 0.079429478 |
| 1262 | 4 | 89444366 | 89444504 | 0.07937932 | 0.079379322 |
| 1263 | 1 | 204159764 | 204159894 | −0.0793083 | 0.0793083 |
| 1264 | 17 | 59494182 | 59494339 | −0.0791127 | 0.0791127 |
| 1265 | 1 | 145589294 | 145589445 | 0.07886059 | 0.078860587 |
| 1266 | 8 | 22422935 | 22423138 | −0.0788544 | 0.0788544 |
| 1267 | 3 | 13937269 | 13937420 | −0.0788094 | 0.0788094 |
| 1268 | 8 | 95274487 | 95274623 | −0.0785181 | 0.0785181 |
| 1269 | 19 | 18682386 | 18682767 | 0.07851104 | 0.078511042 |
| 1270 | 19 | 23578180 | 23578324 | −0.0784898 | 0.0784898 |
| 1271 | 1 | 109236739 | 109237017 | −0.0784117 | 0.0784117 |
| 1272 | 6 | 28642320 | 28642449 | −0.078407 | 0.078407 |
| 1273 | 3 | 168960251 | 168960503 | 0.07833761 | 0.078337608 |
| 1274 | 19 | 44099336 | 44099478 | −0.0782465 | 0.0782465 |
| 1275 | 16 | 27280354 | 27280495 | −0.0779394 | 0.0779394 |
| 1276 | 17 | 18280888 | 18281109 | −0.0778118 | 0.0778118 |
| 1277 | 4 | 13526579 | 13526731 | 0.0777712 | 0.077771202 |
| 1278 | 2 | 8825837 | 8825973 | −0.0777433 | 0.0777433 |
| 1279 | 10 | 23483693 | 23484483 | −0.0775419 | 0.0775419 |
| 1280 | 10 | 122889145 | 122889298 | −0.0775175 | 0.0775175 |
| 1281 | 15 | 89456711 | 89456857 | −0.077444 | 0.077444 |
| 1282 | 17 | 40925163 | 40925301 | 0.07737535 | 0.077375354 |
| 1283 | 2 | 64455475 | 64455625 | 0.07706262 | 0.077062624 |
| 1284 | 2 | 97627527 | 97627667 | −0.0770253 | 0.0770253 |
| 1285 | 22 | 29168428 | 29168569 | −0.0769083 | 0.0769083 |
| 1286 | 19 | 36207458 | 36207603 | 0.0767369 | 0.076736902 |
| 1287 | 2 | 236179663 | 236179798 | −0.0767153 | 0.0767153 |
| 1288 | 2 | 62132547 | 62132863 | 0.07663825 | 0.076638253 |
| 1289 | 17 | 36909232 | 36909379 | 0.07660291 | 0.076602912 |
| 1290 | 1 | 16162576 | 16162733 | 0.07658866 | 0.076588663 |
| 1291 | 1 | 11119775 | 11119946 | −0.0765865 | 0.0765865 |
| 1292 | 3 | 57789573 | 57789724 | 0.07651646 | 0.076516462 |
| 1293 | 13 | 103426207 | 103426418 | 0.07648139 | 0.076481395 |
| 1294 | 5 | 134734921 | 134735139 | −0.0764715 | 0.0764715 |
| 1295 | 9 | 134158183 | 134158333 | −0.0764573 | 0.0764573 |
| 1296 | 8 | 144350102 | 144350250 | −0.0763412 | 0.0763412 |
| 1297 | 3 | 16927876 | 16928120 | −0.0762069 | 0.0762069 |
| 1298 | 5 | 36606442 | 36606602 | 0.07619943 | 0.076199429 |
| 1299 | 12 | 100593379 | 100593526 | 0.07617957 | 0.076179573 |
| 1300 | 6 | 13487592 | 13487735 | 0.07611566 | 0.076115661 |
| 1301 | 3 | 183145875 | 183146097 | 0.07609535 | 0.076095349 |
| 1302 | 9 | 71940697 | 71940835 | 0.07597478 | 0.075974776 |
| 1303 | 3 | 97540983 | 97541109 | −0.0757112 | 0.0757112 |
| 1304 | 14 | 75078764 | 75078927 | 0.07570825 | 0.075708254 |
| 1305 | 3 | 150321760 | 150321898 | 0.07561187 | 0.075611871 |
| 1306 | 6 | 14661536 | 14661684 | 0.07545465 | 0.075454647 |
| 1307 | 6 | 74019753 | 74019891 | 0.07536742 | 0.075367421 |
| 1308 | 16 | 81348294 | 81348442 | 0.07516053 | 0.075160527 |
| 1309 | 1 | 236030963 | 236031093 | −0.0750931 | 0.0750931 |
| 1310 | 18 | 61637369 | 61637508 | 0.07508784 | 0.075087838 |
| 1311 | 19 | 55951874 | 55952001 | −0.075076 | 0.075076 |
| 1312 | 16 | 57570744 | 57570878 | 0.07505805 | 0.075058049 |
| 1313 | 12 | 12876519 | 12876759 | 0.07502004 | 0.075020036 |
| 1314 | 1 | 247267252 | 247267395 | 0.07499757 | 0.074997572 |
| 1315 | 10 | 112327204 | 112327340 | 0.07494649 | 0.07494649 |
| 1316 | 19 | 3338848 | 3338988 | −0.0749459 | 0.0749459 |
| 1317 | 6 | 87864884 | 87865131 | 0.07489821 | 0.074898208 |
| 1318 | 16 | 25268818 | 25268957 | −0.0748057 | 0.0748057 |
| 1319 | 2 | 32853401 | 32853564 | 0.07462515 | 0.074625147 |
| 1320 | 12 | 6981580 | 6981875 | −0.0746208 | 0.0746208 |
| 1321 | 14 | 24422692 | 24423315 | −0.0745034 | 0.0745034 |
| 1322 | 7 | 37590089 | 37590230 | 0.07438605 | 0.074386052 |
| 1323 | 15 | 35837770 | 35837907 | 0.07423382 | 0.074233821 |
| 1324 | 17 | 46673688 | 46674103 | −0.0742176 | 0.0742176 |
| 1325 | 19 | 51843774 | 51843930 | 0.07418882 | 0.074188822 |
| 1326 | 3 | 24563417 | 24563580 | 0.07411333 | 0.074113325 |
| 1327 | 1 | 200842676 | 200842963 | −0.0739448 | 0.0739448 |
| 1328 | 12 | 111531314 | 111531542 | −0.0739356 | 0.0739356 |
| 1329 | 17 | 30677296 | 30677444 | 0.07389726 | 0.073897261 |
| 1330 | 10 | 121301109 | 121301802 | −0.07381 | 0.07381 |
| 1331 | 2 | 135761945 | 135762086 | −0.0737898 | 0.0737898 |
| 1332 | 2 | 208491884 | 208492192 | −0.0737806 | 0.0737806 |
| 1333 | 22 | 50682903 | 50683062 | 0.07355865 | 0.073558646 |
| 1334 | 6 | 57036814 | 57036978 | −0.0733884 | 0.0 |
| 1335 | 8 | 22931963 | 22932101 | 0.0733545 | 0.073 |
| 1336 | 4 | 103481278 | 103481491 | 0.07322764 | 0.073 |
| 1337 | 15 | 50554900 | 50555064 | −0.073122 | 0. |
| 1338 | 7 | 55639050 | 55639196 | −0.0730548 | 0.0 |
| 1339 | 4 | 41215954 | 41216115 | 0.0729973 | 0.0 |
| 1340 | 6 | 80579459 | 80579613 | 0.07296546 | 0.072 |
| 1341 | 14 | 89831229 | 89831624 | −0.0729164 | 0.0 |
| 1342 | 10 | 97889980 | 97890113 | 0.07282578 | 0.072 |
| 1343 | 2 | 128644335 | 128644479 | −0.0727805 | 0.0 |
| 1344 | 4 | 76650592 | 76650730 | −0.0727216 | 0.0 |
| 1345 | 1 | 117452805 | 117452987 | 0.0726993 | 0.072 |
| 1346 | 12 | 49463645 | 49463982 | 0.07265306 | 0.072 |
| 1347 | 1 | 6761856 | 6762004 | −0.072647 | 0. |
| 1348 | 20 | 591008 | 591151 | 0.07257658 | 0.072 |
| 1349 | 14 | 51706897 | 51707062 | −0.0725503 | 0.0 |
| 1350 | 4 | 40057465 | 40057613 | 0.07251481 | 0.072 |
| 1351 | 22 | 38902212 | 38902347 | −0.0724393 | 0.0 |
| 1352 | 17 | 40245148 | 40245292 | 0.07240992 | 0.072 |
| 1353 | 1 | 22109101 | 22109243 | −0.0723371 | 0.0 |
| 1354 | 4 | 87515625 | 87515761 | 0.07217381 | 0.072 |
| 1355 | 15 | 68723612 | 68723763 | −0.0721286 | 0.0 |
| 1356 | X | 49047853 | 49048396 | 0.07197285 | 0.071 |
| 1357 | 6 | 27100970 | 27101202 | 0.07195895 | 0.071 |
| 1358 | 12 | 116996844 | 116997780 | −0.0718508 | 0.0 |
| 1359 | 4 | 57301925 | 57302170 | −0.0717514 | 0.0 |
| 1360 | 10 | 112263912 | 112264045 | −0.0717406 | 0.0 |
| 1361 | 10 | 99205875 | 99206092 | −0.0715996 | 0.0 |
| 1362 | 2 | 99771346 | 99771690 | 0.07158903 | 0.071 |
| 1363 | 9 | 95055972 | 95056123 | 0.07154495 | 0.071 |
| 1364 | 17 | 29421726 | 29421972 | 0.07149059 | 0.071 |
| 1365 | 3 | 10028452 | 10028598 | −0.0714369 | 0.0 |
| 1366 | 15 | 101419574 | 101419718 | −0.0714185 | 0.0 |
| 1367 | 10 | 14223322 | 14223495 | 0.0712683 | 0.071 |
| 1368 | 10 | 94449911 | 94450857 | −0.0712111 | 0.0 |
| 1369 | 4 | 119274112 | 119274267 | 0.07103463 | 0.071034633 |
| 1370 | 15 | 75660896 | 75661094 | −0.070785 | 0.070785 |
| 1371 | 19 | 39109941 | 39110086 | −0.0706344 | 0.0706344 |
| 1372 | 12 | 4386051 | 4386178 | 0.07062279 | 0.070622794 |
| 1373 | 13 | 25321655 | 25321816 | −0.0703692 | 0.0703692 |
| 1374 | 10 | 105991883 | 105992009 | 0.07035892 | 0.070358916 |
| 1375 | 19 | 17420651 | 17420682 | −0.070248 | 0.070248 |
| 1376 | 15 | 74219591 | 74219739 | −0.0700628 | 0.0700628 |
| 1377 | 12 | 54343765 | 54343913 | 0.07002518 | 0.070025185 |
| 1378 | 19 | 18499231 | 18499376 | 0.07000354 | 0.070003544 |
| 1379 | 11 | 1968593 | 1968710 | −0.0699194 | 0.0699194 |
| 1380 | 12 | 104852073 | 104852226 | 0.06982769 | 0.069827692 |
| 1381 | 11 | 35165773 | 35166045 | 0.06973297 | 0.069732974 |
| 1382 | 19 | 2819565 | 2819841 | −0.069697 | 0.069697 |
| 1383 | 14 | 103851423 | 103851669 | −0.06965 | 0.06965 |
| 1384 | 1 | 154971854 | 154971970 | 0.0695939 | 0.069593897 |
| 1385 | 4 | 87813207 | 87813356 | 0.06955204 | 0.069552038 |
| 1386 | 14 | 91783818 | 91784518 | −0.0692192 | 0.0692192 |
| 1387 | 11 | 48034961 | 48035251 | −0.069207 | 0.069207 |
| 1388 | 19 | 18118756 | 18118842 | 0.06916798 | 0.069167985 |
| 1389 | 15 | 57622285 | 57622434 | 0.06914836 | 0.069148364 |
| 1390 | 1 | 38273262 | 38273463 | −0.0690915 | 0.0690915 |
| 1391 | 3 | 49141965 | 49142113 | 0.0690659 | 0.069065903 |
| 1392 | 17 | 78388814 | 78389133 | 0.06903137 | 0.069031368 |
| 1393 | 10 | 70231549 | 70231712 | 0.06896393 | 0.068963935 |
| 1394 | 16 | 88521778 | 88521932 | −0.0688131 | 0.0688131 |
| 1395 | 10 | 95242254 | 95242390 | −0.0687492 | 0.0687492 |
| 1396 | 14 | 37051793 | 37051938 | 0.06868124 | 0.068681244 |
| 1397 | 14 | 100438657 | 100438798 | −0.0686544 | 0.0686544 |
| 1398 | 11 | 18655840 | 18656245 | −0.0685289 | 0.0685289 |
| 1399 | 2 | 97405731 | 97405947 | −0.0685107 | 0.0685107 |
| 1400 | 1 | 27669755 | 27670067 | −0.0683932 | 0.0683932 |
| 1401 | 15 | 40453211 | 40453385 | 0.06836581 | 0.068365806 |
| 1402 | 5 | 157023552 | 157023746 | 0.06833194 | 0.068331938 |
| 1403 | 22 | 24237264 | 24237408 | −0.0682984 | 0.0682984 |
| 1404 | 8 | 144373377 | 144373595 | −0.0682672 | 0.0682672 |
| 1405 | 17 | 48074346 | 48074503 | 0.06826281 | 0.068262812 |
| 1406 | 2 | 101790440 | 101790565 | −0.0681967 | 0.0681967 |
| 1407 | 2 | 61244765 | 61244913 | −0.0681426 | 0.0681426 |
| 1408 | 17 | 47928769 | 47928861 | 0.06791348 | 0.067913477 |
| 1409 | 4 | 47465502 | 47465853 | −0.0678742 | 0.0678742 |
| 1410 | 1 | 19923766 | 19923920 | −0.0676718 | 0.0676718 |
| 1411 | 1 | 154375671 | 154376283 | −0.0676458 | 0.0676458 |
| 1412 | 5 | 153990888 | 153991036 | −0.0676358 | 0.0676358 |
| 1413 | 14 | 52535987 | 52536124 | −0.0674196 | 0.0674196 |
| 1414 | 13 | 40781078 | 40781257 | 0.06738241 | 0.067382406 |
| 1415 | 1 | 228633381 | 228633530 | 0.06734305 | 0.067343053 |
| 1416 | 11 | 131780299 | 131781399 | −0.0673332 | 0.0673332 |
| 1417 | 16 | 30075119 | 30075610 | −0.0672909 | 0.0672909 |
| 1418 | 6 | 34113220 | 34113367 | 0.06717851 | 0.067178513 |
| 1419 | 1 | 8938927 | 8939206 | 0.067119 | 0.067118996 |
| 1420 | 15 | 65117377 | 65117525 | −0.0670929 | 0.0670929 |
| 1421 | 20 | 52488881 | 52489048 | 0.06707789 | 0.067077889 |
| 1422 | 18 | 47476431 | 47476668 | 0.06704155 | 0.067041552 |
| 1423 | 16 | 29611434 | 29611909 | −0.0669547 | 0.0669547 |
| 1424 | 19 | 41257355 | 41257504 | 0.06693737 | 0.066937369 |
| 1425 | 6 | 11224737 | 11224871 | 0.06693137 | 0.066931372 |
| 1426 | 7 | 138915960 | 138916100 | 0.06692137 | 0.066921367 |
| 1427 | 1 | 52456341 | 52456513 | −0.0669146 | 0.0669146 |
| 1428 | 15 | 88579785 | 88579927 | −0.0668697 | 0.0668697 |
| 1429 | 19 | 45157649 | 45157795 | −0.0668643 | 0.0668643 |
| 1430 | 6 | 44494825 | 44494964 | −0.0668499 | 0.0668499 |
| 1431 | 3 | 47020893 | 47021036 | 0.06684119 | 0.066841193 |
| 1432 | 4 | 7710808 | 7710944 | 0.06683578 | 0.066835783 |
| 1433 | 4 | 88343927 | 88344073 | −0.0668289 | 0.0668289 |
| 1434 | 8 | 23584018 | 23584162 | 0.06676321 | 0.066763212 |
| 1435 | 3 | 169940113 | 169940272 | −0.0667524 | 0.0667524 |
| 1436 | 20 | 3452207 | 3452362 | −0.0667246 | 0.0667246 |
| 1437 | 16 | 30960403 | 30960554 | −0.0666995 | 0.0666995 |
| 1438 | 8 | 37757195 | 37757317 | −0.0664322 | 0.0664322 |
| 1439 | 19 | 1383624 | 1383984 | 0.06631448 | 0.066314481 |
| 1440 | 3 | 169377681 | 169378040 | −0.0662975 | 0.0662975 |
| 1441 | 17 | 7232691 | 7232948 | −0.066283 | 0.066283 |
| 1442 | 1 | 55266859 | 55266999 | −0.0662448 | 0.0662448 |
| 1443 | 11 | 94474045 | 94474717 | −0.0661167 | 0.0661167 |
| 1444 | 4 | 148721044 | 148721603 | −0.0661107 | 0.0661107 |
| 1445 | 11 | 64808292 | 64808575 | −0.0660504 | 0.0660504 |
| 1446 | 11 | 112096801 | 112096929 | −0.0660117 | 0.0660117 |
| 1447 | 7 | 98741519 | 98741656 | −0.0659721 | 0.0659721 |
| 1448 | 4 | 100009822 | 100009952 | −0.0659712 | 0.0659712 |
| 1449 | 16 | 791310 | 791447 | −0.0659366 | 0.0659366 |
| 1450 | 2 | 233947203 | 233947392 | −0.0659364 | 0.0659364 |
| 1451 | 10 | 70092744 | 70092889 | 0.06584639 | 0.065846387 |
| 1452 | 14 | 69283406 | 69283585 | 0.06582142 | 0.065821424 |
| 1453 | 1 | 145477154 | 145477274 | −0.0657689 | 0.0657689 |
| 1454 | 19 | 13001817 | 13001956 | −0.0657291 | 0.0657291 |
| 1455 | 7 | 129592241 | 129592408 | −0.065703 | 0.065703 |
| 1456 | 12 | 57634390 | 57634541 | 0.06569519 | 0.065695188 |
| 1457 | 16 | 56691770 | 56691914 | 0.06564482 | 0.065644825 |
| 1458 | 12 | 124086116 | 124086557 | 0.06558476 | 0.065584755 |
| 1459 | 16 | 10479887 | 10480027 | 0.06549719 | 0.065497188 |
| 1460 | 6 | 160490263 | 160490477 | −0.06547 | 0.06547 |
| 1461 | 5 | 166405269 | 166405399 | −0.0654011 | 0.0654011 |
| 1462 | 22 | 46367390 | 46368565 | −0.0653565 | 0.0653565 |
| 1463 | 6 | 43395333 | 43395468 | 0.06530154 | 0.065301544 |
| 1464 | 11 | 61284310 | 61284485 | 0.06527909 | 0.065279092 |
| 1465 | 18 | 11980610 | 11980763 | 0.06518034 | 0.065180336 |
| 1466 | 17 | 46125546 | 46125696 | −0.065097 | 0.065097 |
| 1467 | 2 | 29117656 | 29117889 | 0.06500599 | 0.065005989 |
| 1468 | 1 | 147013506 | 147013652 | −0.0648812 | 0.0648812 |
| 1469 | 19 | 36239832 | 36239959 | −0.064862 | 0.064862 |
| 1470 | 13 | 41635441 | 41635570 | 0.06481267 | 0.064812671 |
| 1471 | 13 | 30880753 | 30880917 | −0.0647782 | 0.0647782 |
| 1472 | 3 | 55040461 | 55040643 | −0.0647187 | 0.0647187 |
| 1473 | 1 | 168148473 | 168148601 | 0.06446946 | 0.064469459 |
| 1474 | 2 | 153032607 | 153032820 | 0.06442883 | 0.064428835 |
| 1475 | 12 | 49110134 | 49110278 | −0.0643318 | 0.0643318 |
| 1476 | 7 | 5534600 | 5534820 | −0.0643042 | 0.0643042 |
| 1477 | 12 | 55413804 | 55413942 | −0.0642967 | 0.0642967 |
| 1478 | 7 | 23510055 | 23510195 | 0.06427013 | 0.064270126 |
| 1479 | 2 | 97505000 | 97505608 | −0.064171 | 0.064171 |
| 1480 | 1 | 161123619 | 161123901 | 0.06414092 | 0.064140922 |
| 1481 | 5 | 16617551 | 16617694 | −0.0640359 | 0.0640359 |
| 1482 | 10 | 58120928 | 58121244 | 0.0639121 | 0.063912099 |
| 1483 | 6 | 118971612 | 118971745 | −0.0639017 | 0.0639017 |
| 1484 | 4 | 113437829 | 113437989 | 0.06383491 | 0.063834909 |
| 1485 | 12 | 7125646 | 7125792 | −0.0633499 | 0.0633499 |
| 1486 | 8 | 99985833 | 99987014 | −0.0632642 | 0.0632642 |
| 1487 | 15 | 75075976 | 75076565 | −0.0632302 | 0.0632302 |
| 1488 | 3 | 139048259 | 139048406 | 0.0631244 | 0.063124402 |
| 1489 | 19 | 51014582 | 51014719 | 0.0630424 | 0.063042401 |
| 1490 | 10 | 116527572 | 116527726 | 0.06290597 | 0.062905967 |
| 1491 | 12 | 104235231 | 104235373 | −0.0628491 | 0.0628491 |
| 1492 | X | 149531950 | 149532201 | 0.06283204 | 0.062832044 |
| 1493 | 1 | 57254349 | 57254489 | −0.0627992 | 0.0627992 |
| 1494 | 3 | 182511012 | 182511139 | 0.06277676 | 0.062776764 |
| 1495 | 11 | 61735234 | 61735403 | −0.0627222 | 0.0627222 |
| 1496 | 13 | 112710714 | 112711663 | −0.0625942 | 0.0625942 |
| 1497 | 19 | 42681346 | 42681498 | 0.06246043 | 0.062460426 |
| 1498 | 8 | 59572375 | 59572552 | −0.0624521 | 0.0624521 |
| 1499 | 10 | 33269699 | 33269875 | 0.06225773 | 0.062257734 |
| 1500 | 20 | 55787850 | 55788043 | 0.06222493 | 0.062224925 |
| 1501 | 2 | 43445592 | 43445931 | −0.0621391 | 0.0621391 |
| 1502 | 15 | 89950225 | 89950761 | −0.0621284 | 0.0621284 |
| 1503 | 16 | 67217680 | 67217827 | 0.06211676 | 0.062116763 |
| 1504 | 19 | 57999386 | 57999501 | 0.06205831 | 0.062058309 |
| 1505 | 1 | 155278199 | 155278335 | −0.0620558 | 0.0620558 |
| 1506 | 22 | 27067579 | 27067792 | −0.0619655 | 0.0619655 |
| 1507 | 14 | 89895934 | 89896115 | 0.06192872 | 0.061928722 |
| 1508 | 12 | 89746253 | 89746389 | 0.0619131 | 0.061913097 |
| 1509 | 10 | 98956099 | 98956244 | 0.06187832 | 0.061878323 |
| 1510 | 5 | 40680003 | 40680093 | −0.061876 | 0.061876 |
| 1511 | 7 | 155137852 | 155137985 | −0.0617756 | 0.0617756 |
| 1512 | 11 | 93862639 | 93862812 | 0.06170645 | 0.06170645 |
| 1513 | 9 | 132598178 | 132598321 | −0.0616729 | 0.0616729 |
| 1514 | 2 | 89064640 | 89065095 | −0.0616638 | 0.0616638 |
| 1515 | 17 | 37824484 | 37824589 | −0.0616066 | 0.0616066 |
| 1516 | 15 | 42186980 | 42187305 | −0.0615827 | 0.0615827 |
| 1517 | 1 | 32538485 | 32538628 | 0.06149362 | 0.061493619 |
| 1518 | 14 | 75084789 | 75085100 | 0.0614399 | 0.0614399 |
| 1519 | 1 | 232929727 | 232929868 | −0.0613728 | 0.0613728 |
| 1520 | 16 | 57279565 | 57279729 | 0.06136956 | 0.061369556 |
| 1521 | 22 | 29137828 | 29138151 | 0.06123253 | 0.061232534 |
| 1522 | 14 | 24911937 | 24912163 | 0.06117432 | 0.061174317 |
| 1523 | 10 | 99789935 | 99790756 | −0.0611623 | 0.0611623 |
| 1524 | 21 | 44073847 | 44073986 | 0.06112069 | 0.061120687 |
| 1525 | 19 | 6361883 | 6362006 | 0.0611063 | 0.061106299 |
| 1526 | 2 | 181846507 | 181846646 | −0.0610954 | 0.0610954 |
| 1527 | 6 | 127664768 | 127664919 | 0.06104096 | 0.061040955 |
| 1528 | 17 | 61554027 | 61554173 | 0.06101625 | 0.061016252 |
| 1529 | 2 | 10549451 | 10549582 | −0.0610147 | 0.0610147 |
| 1530 | 18 | 60986688 | 60986838 | 0.06100925 | 0.061009253 |
| 1531 | 1 | 6639860 | 6640034 | −0.0609881 | 0.0609881 |
| 1532 | 7 | 45066626 | 45067088 | 0.06094465 | 0.060944647 |
| 1533 | 11 | 126081564 | 126081878 | 0.06091442 | 0.060914417 |
| 1534 | 9 | 137030175 | 137030327 | 0.06085835 | 0.060858353 |
| 1535 | 15 | 59980190 | 59980339 | −0.0608286 | 0.0608286 |
| 1536 | 15 | 34875041 | 34875175 | 0.06082396 | 0.060823961 |
| 1537 | 13 | 95655063 | 95655497 | −0.0607597 | 0.0607597 |
| 1538 | 20 | 61810555 | 61810684 | 0.06067127 | 0.060671265 |
| 1539 | 10 | 60145015 | 60145224 | −0.0606086 | 0.0606086 |
| 1540 | 2 | 30454264 | 30454422 | −0.0605935 | 0.0605935 |
| 1541 | 11 | 47381227 | 47381407 | −0.0605769 | 0.0605769 |
| 1542 | 2 | 75427985 | 75428196 | −0.0605755 | 0.0605755 |
| 1543 | 15 | 50474521 | 50474663 | −0.0604858 | 0.0604858 |
| 1544 | 11 | 33279932 | 33280085 | 0.06036745 | 0.060367447 |
| 1545 | 5 | 180230246 | 180231497 | −0.060325 | 0.060325 |
| 1546 | 11 | 18035056 | 18035206 | 0.06024565 | 0.060245648 |
| 1547 | 16 | 65156658 | 65157090 | −0.0601628 | 0.0601628 |
| 1548 | 21 | 45148112 | 45148427 | 0.06012409 | 0.060124088 |
| 1549 | 10 | 71390175 | 71390316 | −0.0601115 | 0.0601115 |
| 1550 | 6 | 27106994 | 27107870 | −0.060035 | 0.060035 |
| 1551 | 14 | 89506798 | 89506930 | −0.0599977 | 0.0599977 |
| 1552 | 2 | 129508030 | 129508175 | 0.05982527 | 0.059825273 |
| 1553 | 3 | 48936311 | 48936554 | −0.059717 | 0.059717 |
| 1554 | 13 | 92051323 | 92051474 | 0.05963122 | 0.059631222 |
| 1555 | 21 | 35987459 | 35987590 | −0.0596238 | 0.0596238 |
| 1556 | 8 | 124252890 | 124253048 | 0.05958382 | 0.059583823 |
| 1557 | 20 | 55964451 | 55964597 | 0.05950828 | 0.059508275 |
| 1558 | 5 | 110560294 | 110560437 | 0.05945218 | 0.059452178 |
| 1559 | 2 | 235459223 | 235459362 | −0.0594435 | 0.0594435 |
| 1560 | 21 | 35747507 | 35747644 | −0.0594037 | 0.0594037 |
| 1561 | 11 | 72504633 | 72504788 | −0.0593953 | 0.0593953 |
| 1562 | 12 | 130388930 | 130389067 | −0.0593298 | 0.0593298 |
| 1563 | 19 | 45579302 | 45579435 | 0.05932751 | 0.059327506 |
| 1564 | 3 | 43732494 | 43732636 | 0.05922118 | 0.059221184 |
| 1565 | 8 | 87520663 | 87520805 | 0.05907619 | 0.05907619 |
| 1566 | 6 | 167040360 | 167040510 | −0.0589265 | 0.0589265 |
| 1567 | 12 | 57504310 | 57504443 | 0.05891256 | 0.058912559 |
| 1568 | 18 | 60986863 | 60987001 | 0.05890108 | 0.058901077 |
| 1569 | 7 | 23571241 | 23571392 | −0.0588981 | 0.0588981 |
| 1570 | 8 | 145754148 | 145754250 | −0.058885 | 0.058885 |
| 1571 | 1 | 208084337 | 208084516 | 0.05884876 | 0.058848761 |
| 1572 | 19 | 3180481 | 3181255 | −0.0587831 | 0.0587831 |
| 1573 | 22 | 43583663 | 43583821 | −0.0587617 | 0.0587617 |
| 1574 | 16 | 15108232 | 15108380 | −0.0587198 | 0.0587198 |
| 1575 | 17 | 48050207 | 48050425 | 0.05863902 | 0.058639024 |
| 1576 | 13 | 114890484 | 114890644 | 0.05863659 | 0.058636588 |
| 1577 | 3 | 99979773 | 99979931 | 0.05862996 | 0.058629958 |
| 1578 | 17 | 4843079 | 4843220 | 0.05856322 | 0.058563223 |
| 1579 | 1 | 1510646 | 1510789 | 0.05849756 | 0.058497557 |
| 1580 | 16 | 75600637 | 75600783 | 0.05848879 | 0.058488791 |
| 1581 | 1 | 154934054 | 154934185 | −0.0583299 | 0.0583299 |
| 1582 | 6 | 139349517 | 139349661 | −0.058297 | 0.058297 |
| 1583 | 17 | 66940807 | 66940987 | −0.0582659 | 0.0582659 |
| 1584 | 3 | 122512884 | 122513025 | 0.05822021 | 0.05822021 |
| 1585 | 17 | 899713 | 899863 | 0.05817084 | 0.058170845 |
| 1586 | 19 | 45927616 | 45927762 | −0.0581346 | 0.0581346 |
| 1587 | 19 | 58258567 | 58258710 | −0.058114 | 0.058114 |
| 1588 | 17 | 56084290 | 56084433 | −0.0580994 | 0.0580994 |
| 1589 | 6 | 35656169 | 35656311 | −0.0580834 | 0.0580834 |
| 1590 | 12 | 109490252 | 109490470 | 0.0580538 | 0.058053805 |
| 1591 | 5 | 66299802 | 66299942 | 0.05797762 | 0.057977622 |
| 1592 | 7 | 112758655 | 112758858 | 0.05792169 | 0.057921692 |
| 1593 | 10 | 11615801 | 11615955 | −0.0578798 | 0.0578798 |
| 1594 | 6 | 11236686 | 11236862 | −0.0578435 | 0.0578435 |
| 1595 | 4 | 1341497 | 1341658 | 0.05782508 | 0.057825083 |
| 1596 | 1 | 23857242 | 23857387 | −0.0578202 | 0.0578202 |
| 1597 | X | 765772 | 765908 | 0.05779822 | 0.057798219 |
| 1598 | 19 | 1095351 | 1095599 | 0.05779319 | 0.057793191 |
| 1599 | 12 | 50451017 | 50451168 | 0.05776348 | 0.057763483 |
| 1600 | 9 | 88969686 | 88969840 | 0.05764064 | 0.057640639 |
| 1601 | 8 | 33342496 | 33342858 | 0.05759447 | 0.057594475 |
| 1602 | 15 | 72668037 | 72668219 | −0.0575399 | 0.0575399 |
| 1603 | 1 | 167598904 | 167599397 | −0.0575231 | 0.0575231 |
| 1604 | 19 | 37569164 | 37569470 | 0.05751998 | 0.057519983 |
| 1605 | 5 | 7850125 | 7850277 | 0.05746799 | 0.057467988 |
| 1606 | 7 | 20698298 | 20698471 | 0.05739104 | 0.057391044 |
| 1607 | 6 | 99283481 | 99283623 | −0.0573733 | 0.0573733 |
| 1608 | 10 | 121632983 | 121633141 | 0.05733661 | 0.057336607 |
| 1609 | 5 | 36606715 | 36606871 | 0.05731299 | 0.05731299 |
| 1610 | 12 | 88536062 | 88536226 | −0.0572492 | 0.0572492 |
| 1611 | 16 | 50781174 | 50781359 | −0.0572438 | 0.0572438 |
| 1612 | 17 | 79825005 | 79825153 | −0.0572106 | 0.0572106 |
| 1613 | 16 | 72698774 | 72698921 | −0.0571735 | 0.0571735 |
| 1614 | 15 | 40074938 | 40075265 | −0.0571484 | 0.0571484 |
| 1615 | 9 | 5627433 | 5627595 | −0.0570234 | 0.0570234 |
| 1616 | 11 | 20035502 | 20035638 | −0.0570019 | 0.0570019 |
| 1617 | 17 | 17585698 | 17585841 | −0.0569979 | 0.0569979 |
| 1618 | 1 | 202318007 | 202318154 | 0.05697674 | 0.056976736 |
| 1619 | 10 | 90967036 | 90967246 | 0.05697434 | 0.056974345 |
| 1620 | 8 | 110346474 | 110346750 | 0.05696992 | 0.056969921 |
| 1621 | 1 | 860850 | 861026 | 0.05692402 | 0.056924022 |
| 1622 | 2 | 152493809 | 152494159 | −0.0568369 | 0.0568369 |
| 1623 | 6 | 30028864 | 30029383 | 0.05678301 | 0.056783009 |
| 1624 | 16 | 20817531 | 20817749 | −0.0567202 | 0.0567202 |
| 1625 | 6 | 26331677 | 26331815 | 0.05662644 | 0.056626441 |
| 1626 | 20 | 61847505 | 61847790 | 0.05654593 | 0.05654593 |
| 1627 | 19 | 20011648 | 20011854 | 0.05643582 | 0.056435825 |
| 1628 | 5 | 36151920 | 36152311 | 0.05642614 | 0.056426138 |
| 1629 | 1 | 149858238 | 149858488 | −0.056396 | 0.056396 |
| 1630 | 1 | 84543298 | 84543453 | −0.056371 | 0.056371 |
| 1631 | 17 | 74582295 | 74582440 | 0.05628964 | 0.056289637 |
| 1632 | 15 | 86125911 | 86126313 | −0.0562493 | 0.0562493 |
| 1633 | 3 | 44037051 | 44037198 | 0.05623676 | 0.056236757 |
| 1634 | 2 | 74642057 | 74642406 | −0.056168 | 0.056168 |
| 1635 | 3 | 53925961 | 53926352 | −0.0561398 | 0.0561398 |
| 1636 | 8 | 70745388 | 70745535 | 0.0561065 | 0.056106499 |
| 1637 | 12 | 125399841 | 125399957 | 0.0561043 | 0.056104302 |
| 1638 | 17 | 79860370 | 79860490 | −0.0560787 | 0.0560787 |
| 1639 | 1 | 165667994 | 165668133 | 0.05604794 | 0.056047945 |
| 1640 | 2 | 170218624 | 170218758 | 0.05599721 | 0.055997208 |
| 1641 | 6 | 20023978 | 20024230 | −0.0559537 | 0.0559537 |
| 1642 | 8 | 134510859 | 134511407 | −0.055895 | 0.055895 |
| 1643 | 18 | 77711924 | 77712063 | 0.05583545 | 0.055835452 |
| 1644 | 22 | 43627077 | 43627209 | 0.05580591 | 0.055805909 |
| 1645 | 7 | 101458663 | 101458804 | 0.05578124 | 0.055781241 |
| 1646 | 12 | 94495835 | 94495976 | 0.0557581 | 0.0557581 |
| 1647 | 4 | 6893925 | 6894395 | −0.0557058 | 0.0557058 |
| 1648 | 3 | 147110590 | 147110731 | −0.0556217 | 0.0556217 |
| 1649 | 6 | 157801815 | 157801963 | 0.0556182 | 0.055618198 |
| 1650 | 6 | 87041199 | 87041345 | 0.05555935 | 0.055559349 |
| 1651 | 11 | 70507737 | 70508689 | −0.0555171 | 0.0555171 |
| 1652 | 15 | 41836365 | 41836646 | 0.05542046 | 0.05542046 |
| 1653 | 6 | 6002160 | 6003716 | −0.0554149 | 0.0554149 |
| 1654 | 1 | 184836671 | 184836813 | −0.0554078 | 0.0554078 |
| 1655 | 6 | 122721213 | 122721361 | −0.0554031 | 0.0554031 |
| 1656 | 8 | 145133335 | 145133611 | 0.0553189 | 0.055318902 |
| 1657 | 1 | 40974583 | 40974726 | 0.05528118 | 0.05528118 |
| 1658 | 1 | 41469262 | 41469672 | −0.0552342 | 0.0552342 |
| 1659 | 12 | 2986298 | 2986510 | −0.0552003 | 0.0552003 |
| 1660 | 15 | 90294392 | 90294671 | −0.0551672 | 0.0551672 |
| 1661 | 3 | 52740247 | 52740396 | 0.05512558 | 0.055125585 |
| 1662 | 13 | 52733487 | 52733744 | 0.05510696 | 0.055106964 |
| 1663 | 11 | 47176795 | 47176979 | −0.0550461 | 0.0550461 |
| 1664 | 10 | 105156096 | 105156517 | 0.05498357 | 0.054983574 |
| 1665 | 6 | 37470109 | 37470276 | 0.05496202 | 0.054962019 |
| 1666 | 8 | 101572018 | 101572157 | −0.0548727 | 0.0548727 |
| 1667 | 18 | 45958529 | 45958667 | −0.0547875 | 0.0547875 |
| 1668 | 2 | 25265064 | 25265231 | −0.0547664 | 0.0547664 |
| 1669 | 6 | 74363377 | 74363510 | 0.0547476 | 0.054747605 |
| 1670 | 14 | 73493866 | 73494124 | 0.05464152 | 0.054641522 |
| 1671 | 7 | 76178877 | 76179019 | −0.0546412 | 0.0546412 |
| 1672 | 16 | 68451666 | 68451820 | −0.0545943 | 0.0545943 |
| 1673 | 19 | 42901229 | 42901406 | 0.05459236 | 0.054592364 |
| 1674 | 19 | 47615915 | 47616062 | −0.0545874 | 0.0545874 |
| 1675 | 1 | 156627381 | 156627469 | −0.0545814 | 0.0545814 |
| 1676 | 9 | 131873586 | 131873726 | 0.0545706 | 0.054570597 |
| 1677 | 14 | 23236386 | 23236526 | 0.05456004 | 0.054560036 |
| 1678 | 3 | 107242554 | 107242704 | −0.0545585 | 0.0545585 |
| 1679 | 6 | 32940232 | 32940647 | 0.05452995 | 0.054529945 |
| 1680 | 8 | 97247765 | 97247970 | 0.0544437 | 0.054443695 |
| 1681 | 7 | 16684673 | 16684816 | −0.0544289 | 0.0544289 |
| 1682 | 11 | 72865504 | 72865776 | 0.05437293 | 0.054372935 |
| 1683 | 22 | 40766477 | 40766755 | 0.05431736 | 0.054317358 |
| 1684 | 6 | 114178123 | 114178299 | 0.05426821 | 0.054268209 |
| 1685 | 1 | 173684316 | 173684630 | 0.0542459 | 0.054245897 |
| 1686 | 12 | 24715423 | 24715567 | 0.05411501 | 0.054115012 |
| 1687 | 12 | 57984845 | 57985146 | 0.05410012 | 0.054100121 |
| 1688 | 6 | 113371566 | 113371782 | 0.05409353 | 0.054093525 |
| 1689 | 18 | 75362843 | 75363007 | 0.05403457 | 0.054034572 |
| 1690 | 15 | 28344269 | 28344598 | 0.05396301 | 0.053963012 |
| 1691 | 4 | 157786825 | 157787067 | 0.0539279 | 0.053927899 |
| 1692 | 19 | 3572330 | 3572479 | 0.05384364 | 0.053843638 |
| 1693 | 2 | 168149913 | 168150059 | −0.0538247 | 0.0538247 |
| 1694 | 15 | 71704619 | 71704761 | 0.05374074 | 0.053740736 |
| 1695 | 19 | 14586732 | 14586883 | −0.0536693 | 0.0536693 |
| 1696 | 8 | 125551253 | 125551431 | 0.05365092 | 0.053650924 |
| 1697 | 1 | 32226619 | 32226758 | 0.05363488 | 0.053634878 |
| 1698 | 6 | 163881680 | 163881820 | −0.0535889 | 0.0535889 |
| 1699 | 3 | 186501960 | 186502101 | −0.053513 | 0.053513 |
| 1700 | 3 | 183977474 | 183977582 | 0.0534942 | 0.053494204 |
| 1701 | 4 | 109541884 | 109542125 | −0.0534631 | 0.0534631 |
| 1702 | 5 | 126084022 | 126084156 | −0.0534541 | 0.0534541 |
| 1703 | 1 | 168105312 | 168105475 | 0.05335896 | 0.053358958 |
| 1704 | 17 | 74267918 | 74268964 | 0.05332071 | 0.053320707 |
| 1705 | X | 11446117 | 11446272 | 0.05318781 | 0.053187812 |
| 1706 | 8 | 81490300 | 81490503 | −0.0531785 | 0.0531785 |
| 1707 | 1 | 59250782 | 59251021 | 0.05317388 | 0.05317388 |
| 1708 | 8 | 58906967 | 58907118 | −0.0530744 | 0.0530744 |
| 1709 | 2 | 190445103 | 190445283 | −0.0530463 | 0.0530463 |
| 1710 | 10 | 13628773 | 13628949 | 0.05299719 | 0.052997195 |
| 1711 | 12 | 46612144 | 46612405 | 0.05293882 | 0.052938822 |
| 1712 | 16 | 66254721 | 66254969 | 0.05279505 | 0.052795049 |
| 1713 | 1 | 202780430 | 202780562 | 0.05270957 | 0.052709571 |
| 1714 | 8 | 22526242 | 22526395 | 0.05269601 | 0.052696007 |
| 1715 | 17 | 48047018 | 48047275 | −0.0526755 | 0.0526755 |
| 1716 | 2 | 98280463 | 98280923 | 0.05263864 | 0.052638639 |
| 1717 | 17 | 65713795 | 65714122 | −0.0526292 | 0.0526292 |
| 1718 | 15 | 40650175 | 40650316 | 0.05258616 | 0.052586164 |
| 1719 | 1 | 155715434 | 155715591 | −0.0525107 | 0.0525107 |
| 1720 | 16 | 791158 | 791307 | −0.0525064 | 0.0525064 |
| 1721 | 15 | 67145778 | 67145924 | 0.05247133 | 0.05247133 |
| 1722 | 10 | 32735309 | 32735448 | −0.0522241 | 0.0522241 |
| 1723 | 1 | 228675887 | 228675965 | −0.0521511 | 0.0521511 |
| 1724 | 20 | 36531269 | 36531394 | 0.05210487 | 0.052104868 |
| 1725 | 2 | 74725131 | 74725277 | 0.05204938 | 0.052049381 |
| 1726 | 1 | 168147896 | 168148445 | 0.05203756 | 0.052037561 |
| 1727 | 4 | 114684102 | 114684266 | −0.051995 | 0.051995 |
| 1728 | 7 | 2395050 | 2395226 | 0.05198374 | 0.051983742 |
| 1729 | 9 | 100880711 | 100881134 | −0.0519557 | 0.0519557 |
| 1730 | 16 | 1525089 | 1525345 | −0.0518618 | 0.0518618 |
| 1731 | 3 | 24719619 | 24719807 | −0.0517329 | 0.0517329 |
| 1732 | 7 | 5371130 | 5371312 | 0.05163402 | 0.051634022 |
| 1733 | 16 | 67282745 | 67282925 | −0.0516322 | 0.0516322 |
| 1734 | 12 | 102270817 | 102270956 | 0.05162855 | 0.051628547 |
| 1735 | 2 | 180871564 | 180871876 | −0.051596 | 0.051596 |
| 1736 | 4 | 141348782 | 141348927 | 0.05156276 | 0.051562764 |
| 1737 | 3 | 185826399 | 185826575 | −0.0515336 | 0.0515336 |
| 1738 | 13 | 48668773 | 48668909 | 0.05143636 | 0.051436362 |
| 1739 | 1 | 171455112 | 171455247 | 0.05141431 | 0.051414313 |
| 1740 | 20 | 62338520 | 62338943 | −0.0514131 | 0.0514131 |
| 1741 | 15 | 73343902 | 73344046 | 0.05135513 | 0.051355134 |
| 1742 | 12 | 115140502 | 115140651 | 0.05134348 | 0.051343483 |
| 1743 | 1 | 8938628 | 8938895 | 0.05134208 | 0.051342082 |
| 1744 | 19 | 44144229 | 44144418 | −0.0512635 | 0.0512635 |
| 1745 | 6 | 30658860 | 30659106 | −0.0512386 | 0.0512386 |
| 1746 | 17 | 55055059 | 55055191 | −0.0511311 | 0.0511311 |
| 1747 | 8 | 79578037 | 79578210 | 0.05112483 | 0.051124832 |
| 1748 | 22 | 19131929 | 19132204 | 0.05110088 | 0.051100876 |
| 1749 | 1 | 154914669 | 154914810 | −0.0510783 | 0.0510783 |
| 1750 | 2 | 70417900 | 70418035 | 0.05104214 | 0.05104214 |
| 1751 | 5 | 43484004 | 43484180 | −0.0509936 | 0.0509936 |
| 1752 | 1 | 111762443 | 111762731 | 0.05097278 | 0.05097278 |
| 1753 | 1 | 144932405 | 144932532 | −0.0507969 | 0.0507969 |
| 1754 | 15 | 52263709 | 52264282 | 0.05071807 | 0.05071807 |
| 1755 | 2 | 60784369 | 60784526 | 0.05068837 | 0.050688372 |
| 1756 | 11 | 73881841 | 73882211 | −0.050615 | 0.050615 |
| 1757 | 2 | 10443058 | 10443211 | 0.05050217 | 0.050502167 |
| 1758 | 11 | 73587650 | 73587800 | 0.05038989 | 0.050389888 |
| 1759 | 17 | 62502179 | 62502360 | −0.0503801 | 0.0503801 |
| 1760 | 7 | 10979693 | 10979839 | −0.0503678 | 0.0503678 |
| 1761 | 8 | 4849554 | 4849982 | −0.0502598 | 0.0502598 |
| 1762 | 13 | 100150911 | 100151151 | −0.0502581 | 0.0502581 |
| 1763 | 2 | 27886420 | 27886596 | −0.0501887 | 0.0501887 |
| 1764 | 2 | 98206096 | 98206246 | 0.05005404 | 0.050054045 |
| 1765 | 17 | 49197418 | 49197564 | −0.050052 | 0.050052 |
| 1766 | 3 | 100427964 | 100428237 | −0.0500271 | 0.0500271 |
| 1767 | 12 | 39299767 | 39299923 | −0.0500127 | 0.0500127 |
| 1768 | 15 | 89164433 | 89164685 | 0.05000653 | 0.050006525 |
| 1769 | 13 | 32421217 | 32421328 | 0.04993863 | 0.049938628 |
| 1770 | 19 | 40910012 | 40910152 | 0.04986422 | 0.049864221 |
| 1771 | 17 | 21414888 | 21415032 | −0.0498383 | 0.0498383 |
| 1772 | 7 | 75115498 | 75115764 | −0.0498005 | 0.0498005 |
| 1773 | 13 | 99960124 | 99960273 | 0.04969758 | 0.049697582 |
| 1774 | 3 | 53915721 | 53915863 | −0.0496109 | 0.0496109 |
| 1775 | 2 | 84686504 | 84686642 | −0.0496 | 0.0496 |
| 1776 | 20 | 61200507 | 61200653 | −0.0495834 | 0.0495834 |
| 1777 | 19 | 19517941 | 19518191 | 0.04958068 | 0.04958068 |
| 1778 | 1 | 180200031 | 180200170 | −0.0495544 | 0.0495544 |
| 1779 | 11 | 67120888 | 67121002 | 0.04951046 | 0.049510461 |
| 1780 | 20 | 35203463 | 35203707 | −0.0494617 | 0.0494617 |
| 1781 | 19 | 13858795 | 13858932 | 0.04937396 | 0.049373964 |
| 1782 | 12 | 122250073 | 122250213 | −0.0493274 | 0.0493274 |
| 1783 | 12 | 62997214 | 62997493 | 0.04932713 | 0.049327125 |
| 1784 | 1 | 155043484 | 155043623 | 0.04924142 | 0.049241425 |
| 1785 | 11 | 65657800 | 65657971 | 0.04921098 | 0.049210982 |
| 1786 | 17 | 79819259 | 79819400 | 0.049192 | 0.049191997 |
| 1787 | X | 39715004 | 39715151 | 0.04917484 | 0.04917484 |
| 1788 | 13 | 77566198 | 77566348 | −0.0491643 | 0.0491643 |
| 1789 | 15 | 73089156 | 73089404 | −0.0491582 | 0.0491582 |
| 1790 | 3 | 113250981 | 113251251 | −0.0491244 | 0.0491244 |
| 1791 | 20 | 25371601 | 25371889 | −0.0491035 | 0.0491035 |
| 1792 | 1 | 210506264 | 210506480 | −0.0490717 | 0.0490717 |
| 1793 | 13 | 41837586 | 41837715 | −0.0490299 | 0.0490299 |
| 1794 | 2 | 237077073 | 237077223 | −0.0490128 | 0.0490128 |
| 1795 | 6 | 159064940 | 159065129 | −0.0489476 | 0.0489476 |
| 1796 | 10 | 43571987 | 43572128 | −0.0489459 | 0.0489459 |
| 1797 | 10 | 133999444 | 133999779 | −0.0489307 | 0.0489307 |
| 1798 | 12 | 79257416 | 79257554 | 0.04889707 | 0.048897072 |
| 1799 | 5 | 132362007 | 132362255 | −0.048853 | 0.048853 |
| 1800 | 20 | 1783887 | 1784026 | 0.0488174 | 0.048817395 |
| 1801 | 12 | 31782787 | 31782939 | 0.04879046 | 0.048790458 |
| 1802 | 19 | 53193835 | 53193981 | −0.0487756 | 0.0487756 |
| 1803 | 15 | 40886098 | 40886310 | 0.04875791 | 0.048757909 |
| 1804 | 19 | 18942738 | 18942885 | −0.0487412 | 0.0487412 |
| 1805 | 7 | 27224233 | 27224412 | 0.04864668 | 0.048646675 |
| 1806 | 2 | 129075408 | 129075545 | 0.04859632 | 0.048596319 |
| 1807 | 19 | 47354246 | 47354359 | −0.0485737 | 0.0485737 |
| 1808 | 1 | 242011820 | 242011968 | −0.0485597 | 0.0485597 |
| 1809 | 4 | 11430371 | 11430520 | −0.0485307 | 0.0485307 |
| 1810 | 17 | 35849368 | 35849508 | 0.0483894 | 0.048389404 |
| 1811 | 10 | 111970870 | 111970970 | 0.04834725 | 0.048347254 |
| 1812 | 9 | 131103130 | 131103272 | 0.0483378 | 0.048337795 |
| 1813 | 15 | 66679727 | 66679869 | 0.04833618 | 0.048336178 |
| 1814 | 10 | 115934333 | 115934528 | 0.04832822 | 0.048328223 |
| 1815 | 14 | 23771982 | 23772271 | −0.0483223 | 0.0483223 |
| 1816 | 19 | 14200449 | 14200600 | 0.04826997 | 0.048269967 |
| 1817 | 5 | 42424764 | 42424898 | −0.0482561 | 0.0482561 |
| 1818 | 8 | 38854251 | 38854500 | 0.04825235 | 0.048252346 |
| 1819 | 2 | 87089294 | 87089498 | 0.0482215 | 0.048221499 |
| 1820 | 17 | 43298695 | 43298832 | −0.0481856 | 0.0481856 |
| 1821 | 10 | 54574351 | 54574498 | 0.0481273 | 0.048127297 |
| 1822 | 19 | 38810323 | 38810518 | 0.04806523 | 0.048065231 |
| 1823 | 7 | 121784026 | 121784181 | 0.04798682 | 0.047986822 |
| 1824 | 1 | 151966028 | 151966276 | −0.0479809 | 0.0479809 |
| 1825 | 16 | 30007320 | 30007672 | 0.04797944 | 0.047979439 |
| 1826 | 20 | 47835753 | 47836108 | 0.04791214 | 0.047912144 |
| 1827 | 1 | 1290647 | 1291088 | −0.0478627 | 0.0478627 |
| 1828 | 12 | 83080602 | 83080753 | −0.0478416 | 0.0478416 |
| 1829 | 22 | 39745675 | 39745822 | −0.0477305 | 0.0477305 |
| 1830 | 10 | 93805510 | 93805752 | 0.04772027 | 0.047720272 |
| 1831 | 3 | 186284957 | 186285106 | −0.0476875 | 0.0476875 |
| 1832 | 7 | 79763809 | 79763944 | −0.047639 | 0.047639 |
| 1833 | 16 | 71929385 | 71929591 | 0.04755952 | 0.047559522 |
| 1834 | 2 | 677296 | 677450 | 0.0474667 | 0.0474667 |
| 1835 | 2 | 242212393 | 242212533 | 0.04742846 | 0.047428456 |
| 1836 | 11 | 47600202 | 47600347 | −0.0473353 | 0.0473353 |
| 1837 | 5 | 72794002 | 72794147 | 0.04732577 | 0.047325774 |
| 1838 | 7 | 6048585 | 6049042 | 0.04725787 | 0.047257869 |
| 1839 | 19 | 40476841 | 40476988 | −0.0472511 | 0.0472511 |
| 1840 | 19 | 58838622 | 58838781 | 0.04723744 | 0.047237445 |
| 1841 | 17 | 7975743 | 7975956 | −0.0472168 | 0.0472168 |
| 1842 | 14 | 23388758 | 23388925 | 0.04713336 | 0.047133358 |
| 1843 | 11 | 46370564 | 46370934 | −0.0470419 | 0.0470419 |
| 1844 | 6 | 79576992 | 79577153 | 0.04698287 | 0.046982872 |
| 1845 | 13 | 112709731 | 112710596 | −0.0468739 | 0.0468739 |
| 1846 | 22 | 51066719 | 51066995 | 0.04683025 | 0.046830248 |
| 1847 | 4 | 144434335 | 144434651 | 0.04678915 | 0.046789154 |
| 1848 | 11 | 65640955 | 65641182 | 0.04678276 | 0.046782761 |
| 1849 | 8 | 123793519 | 123793664 | 0.04676172 | 0.046761719 |
| 1850 | 1 | 218520398 | 218520533 | −0.0467264 | 0.0467264 |
| 1851 | 22 | 22222245 | 22222386 | 0.04665172 | 0.04665172 |
| 1852 | 11 | 115530510 | 115530652 | 0.04657163 | 0.046571626 |
| 1853 | 16 | 67208492 | 67208785 | 0.04655716 | 0.046557158 |
| 1854 | 12 | 12764719 | 12764989 | 0.04653856 | 0.046538562 |
| 1855 | 7 | 20824859 | 20824992 | −0.0464874 | 0.0464874 |
| 1856 | 1 | 27320575 | 27320725 | −0.0464014 | 0.0464014 |
| 1857 | 11 | 636878 | 637266 | −0.0463005 | 0.0463005 |
| 1858 | 4 | 83145067 | 83145256 | 0.0462963 | 0.046296303 |
| 1859 | 5 | 36242375 | 36242522 | 0.04628304 | 0.046283042 |
| 1860 | 8 | 77912489 | 77912750 | −0.0462357 | 0.0462357 |
| 1861 | 22 | 46933015 | 46933151 | 0.0462179 | 0.046217902 |
| 1862 | 16 | 21312199 | 21312354 | 0.04618933 | 0.046189334 |
| 1863 | 19 | 4636385 | 4636522 | −0.0461608 | 0.0461608 |
| 1864 | 8 | 143591740 | 143591848 | 0.04615318 | 0.046153177 |
| 1865 | 19 | 58011512 | 58011630 | −0.0461135 | 0.0461135 |
| 1866 | 2 | 131862987 | 131863131 | −0.046045 | 0.046045 |
| 1867 | 2 | 71175640 | 71175798 | 0.04577325 | 0.045773253 |
| 1868 | 12 | 63544351 | 63544500 | 0.04573534 | 0.045735337 |
| 1869 | 8 | 22409494 | 22409649 | 0.045654 | 0.045653998 |
| 1870 | 2 | 191745390 | 191745820 | 0.04563672 | 0.045636721 |
| 1871 | 15 | 63486084 | 63486222 | 0.04562844 | 0.045628435 |
| 1872 | 17 | 37183314 | 37183795 | −0.0455938 | 0.0455938 |
| 1873 | 7 | 72972130 | 72972297 | −0.0455848 | 0.0455848 |
| 1874 | 1 | 81358242 | 81358510 | −0.045584 | 0.045584 |
| 1875 | 17 | 7388374 | 7388510 | 0.04554102 | 0.045541019 |
| 1876 | 8 | 39976586 | 39976950 | −0.0455398 | 0.0455398 |
| 1877 | 9 | 95055694 | 95055918 | −0.0455398 | 0.0455398 |
| 1878 | 20 | 30434458 | 30434605 | −0.0455101 | 0.0455101 |
| 1879 | 11 | 88071119 | 88071257 | 0.04550591 | 0.04550591 |
| 1880 | 16 | 68482511 | 68482663 | 0.04550231 | 0.045502306 |
| 1881 | 7 | 156803498 | 156803658 | −0.0454937 | 0.0454937 |
| 1882 | 22 | 38500823 | 38500950 | 0.04540493 | 0.045404932 |
| 1883 | 2 | 135016193 | 135016335 | −0.0453644 | 0.0453644 |
| 1884 | 17 | 8151150 | 8151319 | 0.0453434 | 0.045343404 |
| 1885 | 2 | 220306999 | 220307131 | −0.0453352 | 0.0453352 |
| 1886 | 12 | 93964615 | 93964874 | 0.04530025 | 0.045300254 |
| 1887 | 19 | 2900628 | 2900951 | −0.0452822 | 0.0452822 |
| 1888 | 13 | 41345400 | 41345723 | −0.045177 | 0.045177 |
| 1889 | 17 | 21179152 | 21179296 | −0.0451707 | 0.0451707 |
| 1890 | 5 | 34007811 | 34008030 | 0.04515938 | 0.04515938 |
| 1891 | 1 | 224545028 | 224545172 | 0.04508043 | 0.045080428 |
| 1892 | 8 | 87520823 | 87520966 | −0.0449377 | 0.0449377 |
| 1893 | 20 | 7999943 | 8000087 | −0.0448852 | 0.0448852 |
| 1894 | 2 | 32581634 | 32581793 | 0.0448844 | 0.044884402 |
| 1895 | 5 | 180480909 | 180481050 | −0.0448374 | 0.0448374 |
| 1896 | 12 | 56521649 | 56521776 | −0.0448289 | 0.0448289 |
| 1897 | 3 | 49313952 | 49314497 | 0.04479749 | 0.04479749 |
| 1898 | 16 | 30418644 | 30418782 | −0.0447669 | 0.0447669 |
| 1899 | 16 | 87635724 | 87635856 | −0.0447352 | 0.0447352 |
| 1900 | 2 | 208394381 | 208394586 | 0.04471218 | 0.044712181 |
| 1901 | 1 | 234613931 | 234614070 | 0.04470718 | 0.044707183 |
| 1902 | X | 132548111 | 132548253 | 0.04468863 | 0.044688628 |
| 1903 | 2 | 69533887 | 69534033 | 0.04461014 | 0.044610144 |
| 1904 | 2 | 64977211 | 64977368 | 0.04460487 | 0.044604868 |
| 1905 | 1 | 37939845 | 37939998 | −0.0445966 | 0.0445966 |
| 1906 | 9 | 99176003 | 99176154 | −0.0445749 | 0.0445749 |
| 1907 | 12 | 6472617 | 6472751 | −0.0445109 | 0.0445109 |
| 1908 | 11 | 64781407 | 64781513 | −0.0443823 | 0.0443823 |
| 1909 | 11 | 124543335 | 124543474 | 0.04437774 | 0.044377742 |
| 1910 | 11 | 134201875 | 134202019 | 0.04436293 | 0.044362928 |
| 1911 | 1 | 23857452 | 23857627 | −0.0443581 | 0.0443581 |
| 1912 | 1 | 243277530 | 243277771 | −0.0442492 | 0.0442492 |
| 1913 | 1 | 6520276 | 6520442 | 0.04415191 | 0.044151915 |
| 1914 | 7 | 127228760 | 127228913 | 0.04412369 | 0.044123687 |
| 1915 | 20 | 35401825 | 35401971 | −0.0440681 | 0.0440681 |
| 1916 | 11 | 67159701 | 67159855 | −0.0440434 | 0.0440434 |
| 1917 | 3 | 53925226 | 53925361 | −0.0440292 | 0.0440292 |
| 1918 | 6 | 25041895 | 25042259 | −0.0439948 | 0.0439948 |
| 1919 | 12 | 56842936 | 56843212 | 0.04387408 | 0.043874081 |
| 1920 | 9 | 132890688 | 132891509 | 0.04384845 | 0.043848454 |
| 1921 | 1 | 38512752 | 38512905 | −0.0438131 | 0.0438131 |
| 1922 | 12 | 14133205 | 14133361 | −0.0438116 | 0.0438116 |
| 1923 | 1 | 50882826 | 50883111 | −0.0438083 | 0.0438083 |
| 1924 | 7 | 91570424 | 91570576 | 0.04380213 | 0.043802126 |
| 1925 | 1 | 36689322 | 36689460 | −0.0437586 | 0.0437586 |
| 1926 | 20 | 55964826 | 55964884 | 0.04363551 | 0.043635506 |
| 1927 | 5 | 142783765 | 142783903 | −0.0435549 | 0.0435549 |
| 1928 | 2 | 42588262 | 42588404 | −0.0435116 | 0.0435116 |
| 1929 | 12 | 108954455 | 108954601 | −0.0434222 | 0.0434222 |
| 1930 | 7 | 2684815 | 2685354 | −0.0434102 | 0.0434102 |
| 1931 | 1 | 155145705 | 155145977 | 0.04339614 | 0.043396141 |
| 1932 | X | 44105096 | 44105245 | 0.04338967 | 0.043389667 |
| 1933 | 11 | 116643480 | 116643586 | 0.04336021 | 0.043360206 |
| 1934 | 6 | 28863316 | 28863601 | 0.04334023 | 0.043340225 |
| 1935 | 22 | 42343028 | 42343164 | 0.04331336 | 0.043313363 |
| 1936 | 19 | 54960386 | 54960520 | −0.0432931 | 0.0432931 |
| 1937 | 6 | 150262683 | 150262861 | 0.04326991 | 0.043269911 |
| 1938 | 10 | 70939838 | 70940074 | 0.04325666 | 0.043256658 |
| 1939 | 15 | 27018691 | 27018829 | −0.0432285 | 0.0432285 |
| 1940 | 11 | 121288002 | 121288177 | −0.0431727 | 0.0431727 |
| 1941 | 17 | 54991516 | 54991671 | 0.04313678 | 0.043136785 |
| 1942 | 5 | 14581455 | 14581600 | −0.0431136 | 0.0431136 |
| 1943 | 1 | 222886948 | 222887102 | 0.04309868 | 0.043098683 |
| 1944 | 1 | 249167412 | 249167744 | 0.04298873 | 0.042988727 |
| 1945 | 19 | 49956776 | 49956923 | −0.0429559 | 0.0429559 |
| 1946 | 2 | 45528864 | 45529069 | 0.04292999 | 0.042929986 |
| 1947 | 13 | 95363734 | 95363886 | −0.0429161 | 0.0429161 |
| 1948 | 3 | 50607055 | 50607205 | 0.04279731 | 0.042797314 |
| 1949 | 5 | 139047798 | 139048327 | −0.042782 | 0.042782 |
| 1950 | 19 | 1651460 | 1651602 | 0.04278151 | 0.042781507 |
| 1951 | 17 | 37607329 | 37607703 | 0.04274428 | 0.042744276 |
| 1952 | 1 | 174129061 | 174129199 | 0.04269479 | 0.042694791 |
| 1953 | 1 | 110880483 | 110880633 | 0.04269324 | 0.042693244 |
| 1954 | 19 | 17501897 | 17502006 | −0.0426278 | 0.0426278 |
| 1955 | 14 | 100071357 | 100071530 | 0.04256447 | 0.042564471 |
| 1956 | 11 | 66313749 | 66313904 | 0.04244152 | 0.042441524 |
| 1957 | 8 | 124170625 | 124170760 | −0.0424362 | 0.0424362 |
| 1958 | 17 | 42061007 | 42061152 | 0.04243087 | 0.042430873 |
| 1959 | 6 | 106433908 | 106434190 | −0.0423953 | 0.0423953 |
| 1960 | 17 | 48005579 | 48005779 | 0.04237416 | 0.04237416 |
| 1961 | 1 | 26856495 | 26856733 | −0.0423553 | 0.0423553 |
| 1962 | 1 | 44440131 | 44440314 | −0.0422898 | 0.0422898 |
| 1963 | 18 | 2972198 | 2972413 | −0.0421955 | 0.0421955 |
| 1964 | 17 | 19976792 | 19977254 | −0.0421571 | 0.0421571 |
| 1965 | 1 | 1623776 | 1623893 | 0.04213196 | 0.042131958 |
| 1966 | 14 | 92505997 | 92506209 | −0.0421084 | 0.0421084 |
| 1967 | 10 | 38265408 | 38265802 | −0.0420908 | 0.0420908 |
| 1968 | X | 49022528 | 49023980 | 0.04196231 | 0.04196231 |
| 1969 | 19 | 50879453 | 50879721 | −0.041954 | 0.041954 |
| 1970 | 2 | 170590358 | 170590504 | −0.0419426 | 0.0419426 |
| 1971 | 19 | 11205719 | 11206074 | −0.0418832 | 0.0418832 |
| 1972 | 20 | 44519501 | 44519761 | 0.04185323 | 0.041853226 |
| 1973 | 17 | 45908771 | 45909065 | 0.04175079 | 0.041750789 |
| 1974 | 17 | 46178145 | 46178416 | 0.04174811 | 0.041748108 |
| 1975 | 10 | 115743483 | 115743622 | 0.04171432 | 0.041714323 |
| 1976 | 12 | 25538216 | 25538357 | −0.0416855 | 0.0416855 |
| 1977 | X | 129087249 | 129087451 | −0.0416244 | 0.0416244 |
| 1978 | 18 | 24129600 | 24129746 | 0.04162406 | 0.041624055 |
| 1979 | 3 | 49507106 | 49507251 | 0.04161288 | 0.041612876 |
| 1980 | 9 | 124262264 | 124262424 | 0.04160082 | 0.041600819 |
| 1981 | 20 | 56285606 | 56285788 | 0.04159358 | 0.04159358 |
| 1982 | 16 | 2073240 | 2073356 | −0.0415733 | 0.0415733 |
| 1983 | 17 | 73936835 | 73936983 | 0.04154841 | 0.041548415 |
| 1984 | 12 | 54426650 | 54426784 | 0.04144209 | 0.041442091 |
| 1985 | 5 | 131629831 | 131630047 | 0.04139759 | 0.04139759 |
| 1986 | 3 | 52931777 | 52931909 | −0.0413969 | 0.0413969 |
| 1987 | 3 | 136581644 | 136581803 | 0.04136697 | 0.041366966 |
| 1988 | 7 | 99156283 | 99156459 | 0.04125517 | 0.041255167 |
| 1989 | 7 | 90225685 | 90225860 | −0.0411938 | 0.0411938 |
| 1990 | 10 | 119134633 | 119134786 | −0.0411024 | 0.0411024 |
| 1991 | 6 | 27356280 | 27356425 | 0.04104785 | 0.04104785 |
| 1992 | 10 | 80827159 | 80827384 | −0.0410083 | 0.0410083 |
| 1993 | 14 | 21979503 | 21979657 | −0.04099 | 0.04099 |
| 1994 | 13 | 96296913 | 96297082 | −0.040969 | 0.040969 |
| 1995 | 19 | 2478924 | 2479077 | −0.0409635 | 0.0409635 |
| 1996 | 10 | 95462621 | 95462777 | 0.04096084 | 0.040960836 |
| 1997 | 15 | 89907676 | 89907988 | −0.0409356 | 0.0409356 |
| 1998 | 19 | 42498582 | 42498673 | 0.04091679 | 0.040916788 |
| 1999 | 19 | 13227210 | 13227345 | −0.0408955 | 0.0408955 |
| 2000 | 17 | 79885581 | 79885902 | −0.0408866 | 0.0408866 |
| 2001 | 3 | 172310069 | 172310462 | −0.0408355 | 0.0408355 |
| 2002 | 7 | 72936594 | 72936764 | −0.0407666 | 0.0407666 |
| 2003 | 9 | 119449511 | 119449636 | −0.0407474 | 0.0407474 |
| 2004 | 20 | 3778801 | 3778951 | 0.0406502 | 0.0406502 |
| 2005 | 15 | 36871486 | 36871659 | −0.040642 | 0.040642 |
| 2006 | 20 | 35917994 | 35918301 | 0.04060326 | 0.040603259 |
| 2007 | 1 | 143766064 | 143766149 | −0.0405038 | 0.0405038 |
| 2008 | 17 | 44896356 | 44896494 | 0.04048394 | 0.04048394 |
| 2009 | 3 | 128274390 | 128274542 | 0.04038005 | 0.04038005 |
| 2010 | 1 | 61547421 | 61547561 | 0.04037367 | 0.040373667 |
| 2011 | 6 | 143141028 | 143141174 | 0.04031518 | 0.040315175 |
| 2012 | 1 | 236558795 | 236558939 | −0.0403135 | 0.0403135 |
| 2013 | 3 | 69255619 | 69255767 | 0.0401418 | 0.040141801 |
| 2014 | 1 | 84971047 | 84971192 | 0.04008118 | 0.040081178 |
| 2015 | 16 | 71928816 | 71929152 | 0.04001912 | 0.040019116 |
| 2016 | 3 | 27410953 | 27411129 | −0.0399777 | 0.0399777 |
| 2017 | 15 | 86234935 | 86235136 | −0.0398458 | 0.0398458 |
| 2018 | 19 | 49661029 | 49661142 | −0.0398375 | 0.0398375 |
| 2019 | 1 | 36396218 | 36396529 | −0.0398338 | 0.0398338 |
| 2020 | 10 | 73150285 | 73150670 | 0.03981124 | 0.039811244 |
| 2021 | 1 | 111217328 | 111217765 | 0.03978389 | 0.039783891 |
| 2022 | 8 | 818989 | 819379 | −0.0397645 | 0.0397645 |
| 2023 | 5 | 170744786 | 170745029 | −0.0397608 | 0.0397608 |
| 2024 | 6 | 149082248 | 149082395 | 0.03973148 | 0.039731482 |
| 2025 | 17 | 4384628 | 4384951 | −0.0396984 | 0.0396984 |
| 2026 | 1 | 115212822 | 115213002 | −0.0396878 | 0.0396878 |
| 2027 | 1 | 32135778 | 32136197 | −0.0396591 | 0.0396591 |
| 2028 | 3 | 186648470 | 186648611 | −0.0396435 | 0.0396435 |
| 2029 | 14 | 81397255 | 81397646 | −0.0396355 | 0.0396355 |
| 2030 | 6 | 28048881 | 28049054 | 0.03961381 | 0.039613812 |
| 2031 | 6 | 49518270 | 49518439 | 0.03961337 | 0.039613371 |
| 2032 | 8 | 146176190 | 146176334 | −0.0395699 | 0.0395699 |
| 2033 | 15 | 96906680 | 96907249 | −0.0395664 | 0.0395664 |
| 2034 | 3 | 101548036 | 101548220 | −0.039523 | 0.039523 |
| 2035 | 1 | 57045149 | 57045298 | 0.03951138 | 0.03951138 |
| 2036 | 2 | 203103354 | 203103500 | 0.03943677 | 0.039436772 |
| 2037 | 1 | 110753637 | 110753780 | −0.0393548 | 0.0393548 |
| 2038 | 5 | 41925044 | 41925288 | 0.03931507 | 0.039315074 |
| 2039 | 1 | 110162171 | 110162318 | 0.03929389 | 0.039293888 |
| 2040 | 20 | 40247156 | 40247271 | −0.0392637 | 0.0392637 |
| 2041 | X | 13018783 | 13018912 | 0.03925248 | 0.039252483 |
| 2042 | 18 | 43267263 | 43267438 | 0.03923433 | 0.03923433 |
| 2043 | 4 | 38655982 | 38656151 | 0.03922127 | 0.039221272 |
| 2044 | 14 | 89290880 | 89291028 | 0.03916265 | 0.039162648 |
| 2045 | 13 | 29394444 | 29394589 | 0.03910451 | 0.03910451 |
| 2046 | 16 | 69345607 | 69345753 | −0.0390459 | 0.0390459 |
| 2047 | 6 | 97731016 | 97731195 | 0.03902688 | 0.039026881 |
| 2048 | 15 | 91415045 | 91415182 | −0.0389943 | 0.0389943 |
| 2049 | 18 | 55470321 | 55470466 | −0.0388906 | 0.0388906 |
| 2050 | 11 | 87665519 | 87665654 | −0.0388898 | 0.0388898 |
| 2051 | 11 | 77185331 | 77185479 | −0.0388819 | 0.0388819 |
| 2052 | 14 | 91977161 | 91977335 | −0.0387815 | 0.0387815 |
| 2053 | 5 | 180076826 | 180077064 | 0.03874823 | 0.038748229 |
| 2054 | 10 | 71108768 | 71109003 | −0.0387333 | 0.0387333 |
| 2055 | 11 | 34075093 | 34075255 | 0.03872725 | 0.038727251 |
| 2056 | 19 | 50979667 | 50979837 | 0.03870553 | 0.038705529 |
| 2057 | 10 | 75385063 | 75385214 | 0.03869115 | 0.038691146 |
| 2058 | 1 | 38495817 | 38496143 | 0.03867319 | 0.038673187 |
| 2059 | 14 | 23563742 | 23563899 | 0.03865142 | 0.038651424 |
| 2060 | 17 | 7475736 | 7475997 | −0.0386313 | 0.0386313 |
| 2061 | 8 | 70984482 | 70984636 | −0.0385538 | 0.0385538 |
| 2062 | 16 | 4784281 | 4784422 | 0.03854492 | 0.038544919 |
| 2063 | 3 | 2139611 | 2139758 | 0.03853124 | 0.038531241 |
| 2064 | 3 | 111393261 | 111393668 | 0.03852736 | 0.03852736 |
| 2065 | 19 | 47852351 | 47852443 | 0.03850239 | 0.03850239 |
| 2066 | X | 103515494 | 103515658 | 0.03846291 | 0.038462906 |
| 2067 | 9 | 136023520 | 136023649 | 0.03845857 | 0.038458573 |
| 2068 | 14 | 81902277 | 81902418 | −0.0384486 | 0.0384486 |
| 2069 | 15 | 45879487 | 45879630 | 0.03838508 | 0.038385079 |
| 2070 | 12 | 109711221 | 109711356 | 0.03830688 | 0.038306882 |
| 2071 | 2 | 220094090 | 220094711 | 0.0383061 | 0.038306102 |
| 2072 | 22 | 31477566 | 31477705 | −0.0383051 | 0.0383051 |
| 2073 | 8 | 33370558 | 33370783 | −0.0383011 | 0.0383011 |
| 2074 | 11 | 62358924 | 62359206 | 0.03829562 | 0.03829562 |
| 2075 | 2 | 48009652 | 48009801 | −0.0382584 | 0.0382584 |
| 2076 | 6 | 113442005 | 113442150 | −0.0381858 | 0.0381858 |
| 2077 | 5 | 53813314 | 53813633 | −0.038107 | 0.038107 |
| 2078 | 2 | 39346807 | 39346947 | −0.0380955 | 0.0380955 |
| 2079 | 5 | 55117797 | 55117950 | −0.03804 | 0.03804 |
| 2080 | 19 | 12405351 | 12405491 | −0.0380335 | 0.0380335 |
| 2081 | 11 | 59383004 | 59383266 | −0.0380254 | 0.0380254 |
| 2082 | 13 | 42534898 | 42535059 | 0.0380013 | 0.038001303 |
| 2083 | 8 | 125576588 | 125576827 | −0.0379702 | 0.0379702 |
| 2084 | 19 | 35521133 | 35521228 | 0.03796463 | 0.037964631 |
| 2085 | 1 | 185014988 | 185015143 | −0.0379527 | 0.0379527 |
| 2086 | 19 | 15575605 | 15575754 | −0.0379027 | 0.0379027 |
| 2087 | 15 | 75199228 | 75199366 | 0.03784054 | 0.037840543 |
| 2088 | 10 | 105036623 | 105036928 | −0.0378223 | 0.0378223 |
| 2089 | 20 | 25677213 | 25677356 | −0.0377532 | 0.0377532 |
| 2090 | 8 | 80679234 | 80679373 | −0.0377262 | 0.0377262 |
| 2091 | 12 | 56615950 | 56616091 | −0.0376647 | 0.0376647 |
| 2092 | 19 | 20748098 | 20748240 | −0.0376398 | 0.0376398 |
| 2093 | 5 | 180229674 | 180229807 | −0.037622 | 0.037622 |
| 2094 | 15 | 40337341 | 40337481 | 0.03758047 | 0.037580471 |
| 2095 | 10 | 23488631 | 23488772 | −0.0375306 | 0.0375306 |
| 2096 | 10 | 52499670 | 52499811 | 0.03746612 | 0.03746612 |
| 2097 | 6 | 31831280 | 31831751 | 0.03745288 | 0.037452883 |
| 2098 | 1 | 46597559 | 46597699 | 0.03736545 | 0.037365455 |
| 2099 | 8 | 37963316 | 37963507 | −0.0373372 | 0.0373372 |
| 2100 | 6 | 91006521 | 91006733 | −0.0373208 | 0.0373208 |
| 2101 | 8 | 25242719 | 25242906 | 0.03727022 | 0.037270222 |
| 2102 | 6 | 112165026 | 112165161 | −0.037266 | 0.037266 |
| 2103 | 8 | 119963909 | 119964631 | −0.0372409 | 0.0372409 |
| 2104 | 18 | 33709364 | 33709511 | 0.0372392 | 0.037239197 |
| 2105 | 17 | 685023 | 685234 | 0.03718865 | 0.037188649 |
| 2106 | 3 | 99224907 | 99225050 | 0.03718531 | 0.03718531 |
| 2107 | 2 | 55458998 | 55459129 | 0.03717334 | 0.037173336 |
| 2108 | 11 | 108338172 | 108338411 | 0.03714952 | 0.037149521 |
| 2109 | 3 | 138658780 | 138659126 | −0.037138 | 0.037138 |
| 2110 | 6 | 10694730 | 10694969 | 0.03712628 | 0.037126275 |
| 2111 | 6 | 30646853 | 30647100 | −0.0371151 | 0.0371151 |
| 2112 | 2 | 121199879 | 121200232 | −0.0371114 | 0.0371114 |
| 2113 | 4 | 775538 | 775706 | −0.0371112 | 0.0371112 |
| 2114 | 5 | 174159345 | 174159657 | −0.037059 | 0.037059 |
| 2115 | 11 | 8289394 | 8289598 | −0.0370242 | 0.0370242 |
| 2116 | 2 | 132285934 | 132286039 | 0.03699717 | 0.036997173 |
| 2117 | 17 | 46619745 | 46619891 | −0.0369882 | 0.0369882 |
| 2118 | 6 | 131384549 | 131384745 | −0.0368607 | 0.0368607 |
| 2119 | 1 | 92950012 | 92950505 | 0.03682364 | 0.036823637 |
| 2120 | 7 | 32535373 | 32535518 | −0.036788 | 0.036788 |
| 2121 | 10 | 11674337 | 11674487 | −0.0367803 | 0.0367803 |
| 2122 | 1 | 151299726 | 151299859 | −0.0367802 | 0.0367802 |
| 2123 | 4 | 169738153 | 169738332 | −0.0367768 | 0.0367768 |
| 2124 | 10 | 104005414 | 104005555 | 0.03677667 | 0.03677667 |
| 2125 | 5 | 169064374 | 169064612 | 0.0367621 | 0.036762103 |
| 2126 | 15 | 81291986 | 81292279 | −0.0367212 | 0.0367212 |
| 2127 | 3 | 123969257 | 123969565 | 0.03653096 | 0.036530955 |
| 2128 | 12 | 109490555 | 109490705 | 0.03651835 | 0.036518348 |
| 2129 | 7 | 138145451 | 138145595 | −0.0365035 | 0.0365035 |
| 2130 | 17 | 38264570 | 38264731 | 0.03647527 | 0.036475265 |
| 2131 | 6 | 26250607 | 26250819 | 0.03639077 | 0.036390767 |
| 2132 | 19 | 8115286 | 8115537 | 0.0363628 | 0.036362803 |
| 2133 | 17 | 71640220 | 71640433 | 0.03633046 | 0.036330464 |
| 2134 | 15 | 90809072 | 90809232 | −0.0363247 | 0.0363247 |
| 2135 | 14 | 55878561 | 55878714 | 0.03628635 | 0.036286349 |
| 2136 | 9 | 102584411 | 102584565 | 0.03613224 | 0.036132241 |
| 2137 | 4 | 185655157 | 185655519 | −0.035992 | 0.035992 |
| 2138 | 3 | 18486161 | 18486297 | 0.03596883 | 0.035968832 |
| 2139 | 7 | 2883955 | 2884395 | −0.0359552 | 0.0359552 |
| 2140 | 16 | 23521543 | 23521675 | −0.0359189 | 0.0359189 |
| 2141 | 16 | 18573447 | 18573559 | 0.03587824 | 0.035878238 |
| 2142 | 14 | 90422265 | 90422415 | −0.0358766 | 0.0358766 |
| 2143 | 7 | 24612559 | 24612699 | 0.03586128 | 0.035861275 |
| 2144 | 1 | 53098561 | 53098726 | −0.0358515 | 0.0358515 |
| 2145 | 19 | 49653365 | 49653515 | 0.03584928 | 0.035849279 |
| 2146 | 16 | 86612372 | 86612521 | −0.0358423 | 0.0358423 |
| 2147 | 12 | 50794407 | 50794778 | 0.03578039 | 0.035780389 |
| 2148 | 8 | 53627548 | 53627692 | −0.0357573 | 0.0357573 |
| 2149 | 19 | 8641386 | 8641528 | −0.0357566 | 0.0357566 |
| 2150 | 4 | 87281210 | 87281350 | 0.03574537 | 0.035745373 |
| 2151 | 1 | 763052 | 763214 | 0.03573844 | 0.035738439 |
| 2152 | 11 | 122722415 | 122722554 | 0.03569335 | 0.03569335 |
| 2153 | 1 | 25175214 | 25175358 | −0.0356436 | 0.0356436 |
| 2154 | 11 | 85358926 | 85359100 | 0.0356192 | 0.035619197 |
| 2155 | 19 | 12250887 | 12251135 | 0.03557945 | 0.035579453 |
| 2156 | 16 | 15188156 | 15188404 | −0.0355464 | 0.0355464 |
| 2157 | 3 | 51975893 | 51976070 | −0.0355313 | 0.0355313 |
| 2158 | 15 | 67390688 | 67391064 | −0.0355077 | 0.0355077 |
| 2159 | 11 | 95523375 | 95523656 | −0.0355009 | 0.0355009 |
| 2160 | 4 | 56719776 | 56719994 | 0.03543461 | 0.035434612 |
| 2161 | 11 | 46141128 | 46141285 | −0.0354131 | 0.0354131 |
| 2162 | 19 | 2302607 | 2303130 | −0.035352 | 0.035352 |
| 2163 | 11 | 32112379 | 32112536 | 0.03531252 | 0.035312518 |
| 2164 | 19 | 44439531 | 44439674 | 0.0352813 | 0.035281298 |
| 2165 | 10 | 104221144 | 104221291 | −0.0352555 | 0.0352555 |
| 2166 | 21 | 46293989 | 46294130 | 0.03522284 | 0.035222841 |
| 2167 | 11 | 102217701 | 102217845 | 0.03511008 | 0.035110082 |
| 2168 | 18 | 39535018 | 39535254 | 0.03509875 | 0.035098746 |
| 2169 | 18 | 32924469 | 32924718 | 0.03498898 | 0.034988979 |
| 2170 | 3 | 33840389 | 33840529 | 0.03496423 | 0.034964231 |
| 2171 | 7 | 132937564 | 132937831 | 0.03493214 | 0.034932144 |
| 2172 | 1 | 56842354 | 56842515 | 0.0349305 | 0.034930501 |
| 2173 | 20 | 30467550 | 30467699 | 0.03492447 | 0.034924468 |
| 2174 | 4 | 24802292 | 24802490 | −0.0349083 | 0.0349083 |
| 2175 | 5 | 139127623 | 139127768 | −0.034894 | 0.034894 |
| 2176 | 15 | 43212286 | 43212429 | −0.034829 | 0.034829 |
| 2177 | 8 | 96281426 | 96281577 | 0.03478944 | 0.034789443 |
| 2178 | 4 | 106394742 | 106394895 | 0.0347797 | 0.034779695 |
| 2179 | 16 | 5003723 | 5003873 | 0.03476396 | 0.03476396 |
| 2180 | 12 | 112819917 | 112820073 | 0.03476203 | 0.034762034 |
| 2181 | 10 | 3462296 | 3462431 | −0.0347456 | 0.0347456 |
| 2182 | 11 | 536265 | 536411 | −0.0347297 | 0.0347297 |
| 2183 | 2 | 217497811 | 217497952 | 0.03467795 | 0.034677946 |
| 2184 | 1 | 117664395 | 117664678 | 0.03449293 | 0.034492928 |
| 2185 | 15 | 75248696 | 75248842 | 0.03446553 | 0.034465531 |
| 2186 | 1 | 15930047 | 15930288 | 0.03445118 | 0.03445118 |
| 2187 | 7 | 65670051 | 65670332 | −0.0344396 | 0.0344396 |
| 2188 | 12 | 125240106 | 125240252 | −0.0343775 | 0.0343775 |
| 2189 | 16 | 81272333 | 81272468 | −0.0343236 | 0.0343236 |
| 2190 | 7 | 64126874 | 64127030 | −0.0342962 | 0.0342962 |
| 2191 | 20 | 15876174 | 15876523 | −0.0342425 | 0.0342425 |
| 2192 | 16 | 23848360 | 23848507 | 0.03423355 | 0.034233549 |
| 2193 | 10 | 120354004 | 120354146 | −0.0341857 | 0.0341857 |
| 2194 | 20 | 57224582 | 57225357 | −0.0341583 | 0.0341583 |
| 2195 | X | 55035621 | 55035765 | 0.03413458 | 0.03413458 |
| 2196 | 14 | 68141581 | 68141863 | 0.03412424 | 0.034124242 |
| 2197 | 13 | 21141548 | 21141704 | 0.0341004 | 0.034100402 |
| 2198 | 2 | 24306993 | 24307134 | 0.03405893 | 0.034058935 |
| 2199 | 17 | 21030175 | 21030305 | −0.034048 | 0.034048 |
| 2200 | 17 | 40831941 | 40832076 | 0.03402854 | 0.034028535 |
| 2201 | 4 | 41371658 | 41371921 | −0.0340053 | 0.0340053 |
| 2202 | 18 | 28622835 | 28623019 | −0.0339883 | 0.0339883 |
| 2203 | 12 | 50560786 | 50560954 | −0.0339828 | 0.0339828 |
| 2204 | 10 | 122739047 | 122739201 | 0.03397208 | 0.03397208 |
| 2205 | 19 | 2739973 | 2740187 | 0.03384813 | 0.033848133 |
| 2206 | 1 | 43311952 | 43312199 | −0.0338142 | 0.0338142 |
| 2207 | 18 | 47814070 | 47814314 | 0.03380324 | 0.033803244 |
| 2208 | 8 | 9413311 | 9413547 | 0.03377305 | 0.033773049 |
| 2209 | 4 | 96469441 | 96469700 | 0.03374032 | 0.033740323 |
| 2210 | 3 | 49851166 | 49851314 | −0.0336811 | 0.0336811 |
| 2211 | 9 | 97623781 | 97624032 | −0.0336136 | 0.0336136 |
| 2212 | 7 | 99063428 | 99063577 | 0.03361237 | 0.033612371 |
| 2213 | 8 | 100025528 | 100025671 | −0.0334769 | 0.0334769 |
| 2214 | 19 | 39832481 | 39832607 | 0.03339299 | 0.033392992 |
| 2215 | 6 | 26183762 | 26183898 | −0.0333862 | 0.0333862 |
| 2216 | 7 | 42277270 | 42277487 | 0.03336488 | 0.03336488 |
| 2217 | 3 | 10029127 | 10029259 | 0.03334759 | 0.033347588 |
| 2218 | 9 | 98111370 | 98111592 | −0.0332668 | 0.0332668 |
| 2219 | 7 | 32338871 | 32339023 | 0.03322946 | 0.033229456 |
| 2220 | 3 | 193853842 | 193854003 | 0.0331916 | 0.0331916 |
| 2221 | 17 | 73734350 | 73734497 | −0.0331797 | 0.0331797 |
| 2222 | 5 | 392570 | 392906 | 0.03316752 | 0.033167524 |
| 2223 | 8 | 124780272 | 124780421 | 0.03316752 | 0.033167517 |
| 2224 | 7 | 151722394 | 151722532 | 0.03310852 | 0.033108519 |
| 2225 | 11 | 73018232 | 73018376 | 0.03310801 | 0.033108006 |
| 2226 | 17 | 37040212 | 37040418 | 0.03307995 | 0.033079947 |
| 2227 | 10 | 97416487 | 97416767 | 0.03302027 | 0.033020272 |
| 2228 | 13 | 47370964 | 47371125 | 0.03293716 | 0.032937164 |
| 2229 | 2 | 106361945 | 106362097 | −0.0329245 | 0.0329245 |
| 2230 | 9 | 135870001 | 135870216 | −0.0328774 | 0.0328774 |
| 2231 | 8 | 21917374 | 21917724 | −0.0328434 | 0.0328434 |
| 2232 | 14 | 57273215 | 57273356 | −0.0328292 | 0.0328292 |
| 2233 | 19 | 13842492 | 13842658 | −0.0328256 | 0.0328256 |
| 2234 | 3 | 50396604 | 50396747 | −0.0327005 | 0.0327005 |
| 2235 | 14 | 24616932 | 24617081 | 0.03266444 | 0.03266444 |
| 2236 | 3 | 16553437 | 16553929 | −0.0326386 | 0.0326386 |
| 2237 | 3 | 49157834 | 49157980 | −0.0326351 | 0.0326351 |
| 2238 | 5 | 72990128 | 72990298 | 0.03261689 | 0.032616894 |
| 2239 | 11 | 120664769 | 120664913 | −0.0326058 | 0.0326058 |
| 2240 | 9 | 131710371 | 131710594 | 0.03260463 | 0.032604634 |
| 2241 | 11 | 68847902 | 68848092 | −0.0325907 | 0.0325907 |
| 2242 | 2 | 9983779 | 9983918 | 0.03257018 | 0.032570179 |
| 2243 | 2 | 101869897 | 101870034 | −0.0325503 | 0.0325503 |
| 2244 | 2 | 219433552 | 219433689 | 0.03249014 | 0.032490136 |
| 2245 | 5 | 139167456 | 139167593 | 0.03235601 | 0.032356012 |
| 2246 | 19 | 571247 | 571495 | 0.03232752 | 0.032327517 |
| 2247 | X | 13770983 | 13771155 | 0.03231361 | 0.03231361 |
| 2248 | 1 | 33896840 | 33896982 | 0.03230511 | 0.032305109 |
| 2249 | 10 | 77168402 | 77168609 | 0.03224349 | 0.03224349 |
| 2250 | 17 | 37081795 | 37081947 | 0.03224123 | 0.032241226 |
| 2251 | 4 | 76555694 | 76555936 | 0.03223399 | 0.03223399 |
| 2252 | 9 | 101403823 | 101403973 | 0.03219256 | 0.032192555 |
| 2253 | 15 | 70820748 | 70820906 | −0.0320974 | 0.0320974 |
| 2254 | 15 | 45428694 | 45428855 | −0.0320964 | 0.0320964 |
| 2255 | 1 | 229163453 | 229163670 | −0.0320867 | 0.0320867 |
| 2256 | 5 | 169724195 | 169724342 | −0.0320787 | 0.0320787 |
| 2257 | 17 | 42092292 | 42092483 | 0.03202659 | 0.032026593 |
| 2258 | 2 | 44588945 | 44589232 | 0.03200138 | 0.03200138 |
| 2259 | 8 | 130951999 | 130952217 | 0.03189861 | 0.03189861 |
| 2260 | 13 | 102569125 | 102569577 | −0.031877 | 0.031877 |
| 2261 | 3 | 11760531 | 11760676 | −0.0318647 | 0.0318647 |
| 2262 | 22 | 42486673 | 42486755 | 0.03180229 | 0.031802287 |
| 2263 | 3 | 152878285 | 152878432 | 0.03178919 | 0.03178919 |
| 2264 | X | 83757356 | 83757570 | 0.03177149 | 0.031771486 |
| 2265 | 7 | 14030057 | 14030192 | 0.0317073 | 0.031707301 |
| 2266 | 19 | 3505874 | 3506018 | −0.0317069 | 0.0317069 |
| 2267 | 18 | 812417 | 812666 | −0.0316987 | 0.0316987 |
| 2268 | 11 | 126081924 | 126082070 | 0.03169228 | 0.031692283 |
| 2269 | 16 | 67906831 | 67907077 | 0.03166173 | 0.031661725 |
| 2270 | 8 | 72917038 | 72917587 | −0.0316456 | 0.0316456 |
| 2271 | 19 | 12405760 | 12405936 | −0.0316425 | 0.0316425 |
| 2272 | 19 | 41256315 | 41256407 | −0.0316206 | 0.0316206 |
| 2273 | 1 | 51435539 | 51435695 | 0.03158644 | 0.031586441 |
| 2274 | 16 | 475416 | 475560 | 0.03152746 | 0.03152746 |
| 2275 | 2 | 238864556 | 238865237 | −0.0315116 | 0.0315116 |
| 2276 | 19 | 662254 | 662392 | 0.03148049 | 0.031480492 |
| 2277 | 1 | 166944750 | 166944928 | −0.0314482 | 0.0314482 |
| 2278 | 5 | 118681638 | 118681774 | 0.0313988 | 0.031398802 |
| 2279 | 4 | 38308322 | 38308467 | 0.03139435 | 0.031394347 |
| 2280 | 10 | 32635741 | 32635878 | 0.03136709 | 0.031367086 |
| 2281 | 17 | 6939227 | 6939378 | −0.0313134 | 0.0313134 |
| 2282 | 7 | 139476839 | 139476985 | 0.03124404 | 0.031244043 |
| 2283 | 9 | 102669395 | 102669535 | 0.03121711 | 0.031217108 |
| 2284 | 6 | 31926490 | 31926982 | 0.03110805 | 0.031108054 |
| 2285 | 13 | 37393843 | 37393996 | −0.0310751 | 0.0310751 |
| 2286 | 2 | 66801800 | 66801947 | −0.0310031 | 0.0310031 |
| 2287 | 13 | 33000256 | 33000399 | −0.0309924 | 0.0309924 |
| 2288 | 2 | 10442136 | 10442386 | −0.03093 | 0.03093 |
| 2289 | X | 129219827 | 129219959 | 0.03091585 | 0.030915849 |
| 2290 | 4 | 186346979 | 186347188 | 0.03087745 | 0.030877446 |
| 2291 | 9 | 5841939 | 5842078 | −0.0308301 | 0.0308301 |
| 2292 | 5 | 141071823 | 141071959 | −0.0307828 | 0.0307828 |
| 2293 | 6 | 27094984 | 27095193 | 0.03078005 | 0.030780049 |
| 2294 | 11 | 105947184 | 105947475 | 0.03077907 | 0.030779075 |
| 2295 | 19 | 7587235 | 7587585 | 0.03076786 | 0.030767864 |
| 2296 | 11 | 2909646 | 2909790 | 0.03070609 | 0.030706086 |
| 2297 | 3 | 118959389 | 118959641 | −0.0306949 | 0.0306949 |
| 2298 | 1 | 119549234 | 119549388 | 0.03067518 | 0.030675175 |
| 2299 | 1 | 36863519 | 36863728 | 0.0306448 | 0.030644803 |
| 2300 | 7 | 72936535 | 72936573 | 0.03062206 | 0.030622058 |
| 2301 | 6 | 135484562 | 135484708 | 0.03053193 | 0.030531934 |
| 2302 | 1 | 71546408 | 71546546 | 0.03053079 | 0.030530789 |
| 2303 | 17 | 66098035 | 66098178 | −0.030512 | 0.030512 |
| 2304 | 8 | 77911599 | 77911748 | −0.030464 | 0.030464 |
| 2305 | 12 | 120426470 | 120426699 | −0.0304511 | 0.0304511 |
| 2306 | 3 | 87275913 | 87276053 | −0.0304167 | 0.0304167 |
| 2307 | 14 | 57271965 | 57272184 | −0.0303753 | 0.0303753 |
| 2308 | 19 | 54599141 | 54599364 | 0.03037244 | 0.030372445 |
| 2309 | 1 | 235490677 | 235490811 | −0.0303632 | 0.0303632 |
| 2310 | 2 | 209130966 | 209131062 | −0.0303052 | 0.0303052 |
| 2311 | 14 | 102785904 | 102786048 | −0.030278 | 0.030278 |
| 2312 | 17 | 36905918 | 36906082 | 0.03023802 | 0.030238021 |
| 2313 | 6 | 43485033 | 43485193 | −0.0302323 | 0.0302323 |
| 2314 | 2 | 27886679 | 27886823 | −0.0301233 | 0.0301233 |
| 2315 | 12 | 9800674 | 9800882 | −0.0301085 | 0.0301085 |
| 2316 | 2 | 230931713 | 230931990 | 0.0300612 | 0.030061195 |
| 2317 | 6 | 117198107 | 117198267 | 0.03005838 | 0.030058377 |
| 2318 | 7 | 99155688 | 99156205 | −0.0300334 | 0.0300334 |
| 2319 | 16 | 19179176 | 19179331 | 0.03003259 | 0.030032593 |
| 2320 | 13 | 45885815 | 45885953 | 0.03002332 | 0.030023324 |
| 2321 | 5 | 5494911 | 5495060 | −0.0300011 | 0.0300011 |
| 2322 | 14 | 55196891 | 55197206 | 0.02995606 | 0.029956062 |
| 2323 | 17 | 40688584 | 40688838 | 0.02994612 | 0.029946123 |
| 2324 | 6 | 26197657 | 26197810 | −0.029933 | 0.029933 |
| 2325 | 7 | 97501650 | 97501939 | 0.02990407 | 0.029904072 |
| 2326 | 5 | 1112032 | 1112385 | −0.0298834 | 0.0298834 |
| 2327 | 2 | 70418045 | 70418253 | 0.0298832 | 0.029883198 |
| 2328 | 15 | 51200186 | 51200446 | 0.02984212 | 0.02984212 |
| 2329 | 12 | 75905151 | 75905298 | 0.02978694 | 0.029786943 |
| 2330 | 10 | 61970065 | 61970308 | 0.02977618 | 0.029776183 |
| 2331 | 10 | 94050441 | 94050580 | 0.02974029 | 0.029740293 |
| 2332 | 6 | 27280344 | 27280486 | 0.02965293 | 0.029652927 |
| 2333 | 8 | 124169963 | 124170098 | −0.0296355 | 0.0296355 |
| 2334 | 12 | 118813863 | 118813996 | −0.0296274 | 0.0296274 |
| 2335 | 12 | 32113021 | 32113162 | −0.0296013 | 0.0296013 |
| 2336 | 8 | 17942364 | 17942606 | 0.02956297 | 0.029562975 |
| 2337 | 12 | 80328084 | 80328227 | 0.02949736 | 0.029497356 |
| 2338 | 2 | 71559261 | 71559401 | −0.029465 | 0.029465 |
| 2339 | 1 | 91301126 | 91301274 | 0.02945565 | 0.029455649 |
| 2340 | 6 | 35995554 | 35995764 | 0.02938214 | 0.029382138 |
| 2341 | 13 | 31618672 | 31618814 | −0.0293511 | 0.0293511 |
| 2342 | 14 | 24711525 | 24711707 | −0.0293449 | 0.0293449 |
| 2343 | 3 | 14988759 | 14988918 | 0.02934242 | 0.029342423 |
| 2344 | 9 | 6412911 | 6413048 | −0.0292593 | 0.0292593 |
| 2345 | 11 | 35684719 | 35684862 | −0.0292519 | 0.0292519 |
| 2346 | 17 | 18061489 | 18061636 | −0.0292503 | 0.0292503 |
| 2347 | 13 | 43169157 | 43169316 | −0.0292497 | 0.0292497 |
| 2348 | 1 | 27191184 | 27191334 | 0.02919978 | 0.029199777 |
| 2349 | 10 | 3807256 | 3807553 | 0.02917495 | 0.029174954 |
| 2350 | 5 | 89705799 | 89706079 | −0.0291422 | 0.0291422 |
| 2351 | 7 | 19157149 | 19157340 | 0.02912969 | 0.029129691 |
| 2352 | 19 | 47633860 | 47634173 | 0.02903297 | 0.02903297 |
| 2353 | 17 | 46671418 | 46671573 | 0.02903149 | 0.029031487 |
| 2354 | 19 | 57922240 | 57922398 | −0.0290116 | 0.0290116 |
| 2355 | 2 | 109647626 | 109647910 | −0.0290055 | 0.0290055 |
| 2356 | 4 | 44450807 | 44451159 | 0.02900067 | 0.029000672 |
| 2357 | 10 | 121484819 | 121484981 | 0.02899961 | 0.028999612 |
| 2358 | 17 | 72968918 | 72969117 | 0.02897104 | 0.028971043 |
| 2359 | 3 | 128968274 | 128968493 | 0.02895222 | 0.028952223 |
| 2360 | 1 | 21985908 | 21986060 | 0.02891198 | 0.028911976 |
| 2361 | 19 | 44617748 | 44617886 | 0.02889936 | 0.028899361 |
| 2362 | 11 | 66726154 | 66726307 | −0.0288818 | 0.0288818 |
| 2363 | 10 | 103815565 | 103815697 | 0.02881991 | 0.028819905 |
| 2364 | 13 | 112715334 | 112716239 | −0.0287746 | 0.0287746 |
| 2365 | 2 | 38770324 | 38770466 | 0.02871377 | 0.028713767 |
| 2366 | 17 | 4853679 | 4853985 | −0.0287078 | 0.0287078 |
| 2367 | 20 | 22562419 | 22564254 | −0.0286759 | 0.0286759 |
| 2368 | 18 | 57365048 | 57365175 | 0.02858607 | 0.02858607 |
| 2369 | 16 | 30886512 | 30886657 | −0.028548 | 0.028548 |
| 2370 | 1 | 155948074 | 155948264 | 0.028418 | 0.028418002 |
| 2371 | 12 | 6714865 | 6715005 | 0.02840456 | 0.028404562 |
| 2372 | 1 | 14507894 | 14508052 | 0.02834284 | 0.028342839 |
| 2373 | 21 | 43482122 | 43483179 | −0.0283405 | 0.0283405 |
| 2374 | 17 | 45266112 | 45266273 | 0.02833294 | 0.028332939 |
| 2375 | 11 | 68039622 | 68039766 | −0.0282739 | 0.0282739 |
| 2376 | 2 | 199009496 | 199009665 | −0.0282723 | 0.0282723 |
| 2377 | 6 | 43603353 | 43603503 | 0.02826496 | 0.028264964 |
| 2378 | 11 | 46403337 | 46403480 | −0.0282302 | 0.0282302 |
| 2379 | 16 | 11043239 | 11043425 | −0.0281513 | 0.0281513 |
| 2380 | 4 | 99849576 | 99849934 | −0.028144 | 0.028144 |
| 2381 | 8 | 8751249 | 8751387 | −0.0280899 | 0.0280899 |
| 2382 | 19 | 19249123 | 19249533 | −0.0280893 | 0.0280893 |
| 2383 | 1 | 35734726 | 35734867 | −0.0280578 | 0.0280578 |
| 2384 | 8 | 27491129 | 27491320 | 0.02805436 | 0.028054362 |
| 2385 | 9 | 117128714 | 117128905 | 0.02802503 | 0.028025031 |
| 2386 | 4 | 15006563 | 15006808 | −0.0280021 | 0.0280021 |
| 2387 | 11 | 66189220 | 66189358 | −0.0279905 | 0.0279905 |
| 2388 | 4 | 185394083 | 185394219 | 0.02797242 | 0.027972419 |
| 2389 | 2 | 97203695 | 97204830 | 0.02795296 | 0.027952958 |
| 2390 | 10 | 15138720 | 15138875 | 0.02792636 | 0.027926359 |
| 2391 | 20 | 45402414 | 45402551 | −0.0279238 | 0.0279238 |
| 2392 | 14 | 96829512 | 96829671 | 0.02791186 | 0.027911858 |
| 2393 | 15 | 45747038 | 45747306 | 0.02783855 | 0.027838546 |
| 2394 | 14 | 35591760 | 35591906 | 0.02781582 | 0.027815824 |
| 2395 | 22 | 39437270 | 39437501 | −0.0278157 | 0.0278157 |
| 2396 | 17 | 48171722 | 48171928 | −0.027802 | 0.027802 |
| 2397 | 9 | 95168959 | 95169113 | −0.0277917 | 0.0277917 |
| 2398 | 10 | 118928347 | 118928839 | 0.0277781 | 0.027778102 |
| 2399 | 2 | 45157259 | 45157793 | −0.0277534 | 0.0277534 |
| 2400 | 1 | 21023424 | 21023568 | 0.02774778 | 0.027747778 |
| 2401 | 4 | 2935616 | 2935768 | −0.0276916 | 0.0276916 |
| 2402 | 17 | 46970343 | 46970479 | −0.0276194 | 0.0276194 |
| 2403 | 1 | 200011604 | 200011770 | 0.02760893 | 0.027608927 |
| 2404 | 3 | 40547626 | 40547783 | −0.0275812 | 0.0275812 |
| 2405 | 5 | 159546139 | 159546280 | 0.02751246 | 0.027512456 |
| 2406 | 2 | 38607602 | 38607847 | 0.0274942 | 0.027494196 |
| 2407 | 10 | 28031191 | 28031350 | 0.02740709 | 0.027407091 |
| 2408 | 1 | 144593264 | 144593380 | −0.0273665 | 0.0273665 |
| 2409 | 1 | 155052116 | 155052269 | 0.02733614 | 0.027336139 |
| 2410 | 14 | 36003288 | 36003602 | 0.02729416 | 0.027294158 |
| 2411 | 1 | 236767476 | 236767692 | 0.02728061 | 0.027280611 |
| 2412 | 3 | 53880286 | 53880434 | −0.027199 | 0.027199 |
| 2413 | 3 | 141206825 | 141206978 | −0.027139 | 0.027139 |
| 2414 | 19 | 58912645 | 58912797 | −0.0270727 | 0.0270727 |
| 2415 | 16 | 46918084 | 46918228 | −0.0270495 | 0.0270495 |
| 2416 | 20 | 3082808 | 3083028 | −0.0269773 | 0.0269773 |
| 2417 | 15 | 65203835 | 65204183 | 0.02695964 | 0.026959644 |
| 2418 | 2 | 54014383 | 54014529 | 0.02693241 | 0.026932415 |
| 2419 | 8 | 99129702 | 99129846 | 0.02692789 | 0.026927887 |
| 2420 | 15 | 96888734 | 96889604 | −0.0269235 | 0.0269235 |
| 2421 | 4 | 39979705 | 39979854 | 0.02684662 | 0.026846616 |
| 2422 | 19 | 15529373 | 15529526 | 0.02680884 | 0.026808843 |
| 2423 | 19 | 42746805 | 42746981 | −0.0267783 | 0.0267783 |
| 2424 | 12 | 31477365 | 31477499 | 0.02676091 | 0.026760908 |
| 2425 | 15 | 75230202 | 75230351 | −0.0266936 | 0.0266936 |
| 2426 | 22 | 36847877 | 36848187 | −0.0266912 | 0.0266912 |
| 2427 | 13 | 23733782 | 23733925 | −0.0266346 | 0.0266346 |
| 2428 | 14 | 55034468 | 55034745 | −0.0265633 | 0.0265633 |
| 2429 | 15 | 43622177 | 43622323 | −0.0265505 | 0.0265505 |
| 2430 | 12 | 42876809 | 42876946 | −0.0264536 | 0.0264536 |
| 2431 | 7 | 156433367 | 156433596 | 0.02639649 | 0.026396495 |
| 2432 | 19 | 7994399 | 7994542 | −0.0263653 | 0.0263653 |
| 2433 | 3 | 38178189 | 38178332 | −0.0263111 | 0.0263111 |
| 2434 | 11 | 797964 | 798191 | −0.0262587 | 0.0262587 |
| 2435 | 1 | 95221295 | 95221474 | −0.026187 | 0.026187 |
| 2436 | 4 | 146018888 | 146019027 | 0.02617906 | 0.026179059 |
| 2437 | 13 | 99064079 | 99064490 | 0.02614283 | 0.026142831 |
| 2438 | X | 136115909 | 136116222 | −0.0261264 | 0.0261264 |
| 2439 | 7 | 142490883 | 142491018 | 0.02612457 | 0.026124572 |
| 2440 | 7 | 97601565 | 97601778 | 0.02612065 | 0.026120653 |
| 2441 | 7 | 134143835 | 134144183 | 0.02611415 | 0.026114145 |
| 2442 | 6 | 26156157 | 26156306 | −0.0260271 | 0.0260271 |
| 2443 | 3 | 38179800 | 38179971 | −0.0260235 | 0.0260235 |
| 2444 | 5 | 52776264 | 52776414 | −0.0260014 | 0.0260014 |
| 2445 | 2 | 241458869 | 241459036 | 0.02597598 | 0.025975977 |
| 2446 | 16 | 6948482 | 6948621 | 0.02596089 | 0.025960888 |
| 2447 | 22 | 30711089 | 30711247 | −0.0259586 | 0.0259586 |
| 2448 | 1 | 113933860 | 113934032 | 0.02592096 | 0.025920957 |
| 2449 | 21 | 40556037 | 40556181 | −0.0258965 | 0.0258965 |
| 2450 | 12 | 100594716 | 100594865 | 0.02588037 | 0.02588037 |
| 2451 | 2 | 27651492 | 27651628 | −0.0258633 | 0.0258633 |
| 2452 | 7 | 27779519 | 27779832 | 0.02582783 | 0.025827825 |
| 2453 | 11 | 130786447 | 130786700 | −0.025826 | 0.025826 |
| 2454 | 20 | 49411515 | 49411665 | −0.025826 | 0.025826 |
| 2455 | 22 | 19434844 | 19434991 | 0.02577756 | 0.02577756 |
| 2456 | 14 | 52118034 | 52118179 | −0.0257746 | 0.0257746 |
| 2457 | 11 | 46260718 | 46260860 | 0.02576182 | 0.025761817 |
| 2458 | 4 | 41748495 | 41748710 | −0.0257486 | 0.0257486 |
| 2459 | 7 | 23145191 | 23145394 | 0.02572936 | 0.02572936 |
| 2460 | 16 | 85722233 | 85722373 | −0.025725 | 0.025725 |
| 2461 | 17 | 54991324 | 54991426 | −0.025721 | 0.025721 |
| 2462 | 3 | 197477153 | 197477326 | −0.0257188 | 0.0257188 |
| 2463 | 3 | 53380731 | 53380869 | −0.0256786 | 0.0256786 |
| 2464 | 16 | 21371499 | 21371756 | 0.02565753 | 0.025657529 |
| 2465 | 6 | 52441643 | 52441794 | 0.02563354 | 0.025633539 |
| 2466 | 13 | 52585738 | 52585881 | 0.02562988 | 0.025629878 |
| 2467 | 9 | 102585241 | 102585383 | 0.02559556 | 0.02559556 |
| 2468 | 2 | 175643253 | 175643431 | −0.0255887 | 0.0255887 |
| 2469 | 11 | 20180362 | 20180501 | 0.02553036 | 0.025530358 |
| 2470 | 1 | 26633338 | 26633417 | 0.02547583 | 0.025475829 |
| 2471 | 17 | 42072292 | 42072447 | −0.025424 | 0.025424 |
| 2472 | 19 | 40023205 | 40023627 | −0.0253935 | 0.0253935 |
| 2473 | 3 | 47517183 | 47517322 | −0.025373 | 0.025373 |
| 2474 | 19 | 8009025 | 8009155 | 0.02529847 | 0.025298467 |
| 2475 | 7 | 29234021 | 29234159 | 0.02525877 | 0.025258766 |
| 2476 | 8 | 104033556 | 104033817 | −0.0252331 | 0.0252331 |
| 2477 | 17 | 38219758 | 38219919 | −0.0252304 | 0.0252304 |
| 2478 | 2 | 20424246 | 20424410 | 0.02522332 | 0.02522332 |
| 2479 | 2 | 173327793 | 173327943 | −0.0251899 | 0.0251899 |
| 2480 | 17 | 62493119 | 62493289 | 0.02514371 | 0.025143709 |
| 2481 | 1 | 29508727 | 29508887 | 0.02510467 | 0.025104672 |
| 2482 | 19 | 53935671 | 53935825 | 0.02503503 | 0.025035029 |
| 2483 | 19 | 49314114 | 49314260 | −0.0250238 | 0.0250238 |
| 2484 | 1 | 7187954 | 7188096 | −0.0249866 | 0.0249866 |
| 2485 | 1 | 151031997 | 151032151 | −0.0249441 | 0.0249441 |
| 2486 | 17 | 20870342 | 20870492 | 0.02486758 | 0.02486758 |
| 2487 | 17 | 80057178 | 80057427 | −0.0248171 | 0.0248171 |
| 2488 | 1 | 17306889 | 17307042 | 0.02470394 | 0.024703938 |
| 2489 | 3 | 128417280 | 128417387 | 0.02466356 | 0.024663561 |
| 2490 | 7 | 100137022 | 100137176 | 0.02460081 | 0.024600808 |
| 2491 | 10 | 8079936 | 8080088 | −0.0245944 | 0.0245944 |
| 2492 | 16 | 18995324 | 18995611 | −0.0245716 | 0.0245716 |
| 2493 | 10 | 112836105 | 112836245 | −0.0245433 | 0.0245433 |
| 2494 | 6 | 53516635 | 53516776 | 0.02450929 | 0.024509294 |
| 2495 | 3 | 150803981 | 150804124 | 0.02447865 | 0.024478655 |
| 2496 | 1 | 47900180 | 47900355 | −0.0244707 | 0.0244707 |
| 2497 | 1 | 210502426 | 210502567 | −0.0244332 | 0.0244332 |
| 2498 | 6 | 90121758 | 90121892 | 0.02442249 | 0.024422485 |
| 2499 | 1 | 249153042 | 249153212 | −0.0244122 | 0.0244122 |
| 2500 | 19 | 4791240 | 4791381 | −0.0244096 | 0.0244096 |
| 2501 | 21 | 45662186 | 45662327 | 0.02429253 | 0.024292532 |
| 2502 | 20 | 18547924 | 18548181 | 0.02426861 | 0.024268613 |
| 2503 | 20 | 10414643 | 10414802 | 0.02426527 | 0.024265272 |
| 2504 | 3 | 184080736 | 184080873 | −0.0242458 | 0.0242458 |
| 2505 | 11 | 61659251 | 61659508 | −0.0240574 | 0.0240574 |
| 2506 | 1 | 84971602 | 84971765 | 0.02403587 | 0.024035874 |
| 2507 | 11 | 19798664 | 19798825 | 0.02402279 | 0.024022791 |
| 2508 | 3 | 147137192 | 147137393 | −0.0240189 | 0.0240189 |
| 2509 | 5 | 160974475 | 160974622 | 0.02400835 | 0.024008346 |
| 2510 | 2 | 97523780 | 97523916 | −0.023943 | 0.023943 |
| 2511 | 16 | 279153 | 279303 | 0.02393229 | 0.023932286 |
| 2512 | 8 | 17779920 | 17780370 | −0.0239162 | 0.0239162 |
| 2513 | 3 | 133614413 | 133614649 | −0.0239041 | 0.0239041 |
| 2514 | 1 | 198125321 | 198125463 | −0.023859 | 0.023859 |
| 2515 | 2 | 119981690 | 119981837 | −0.0238487 | 0.0238487 |
| 2516 | 13 | 77901401 | 77901561 | −0.0237947 | 0.0237947 |
| 2517 | 12 | 56523196 | 56523352 | 0.02358849 | 0.023588485 |
| 2518 | 19 | 53237578 | 53237705 | 0.02356801 | 0.023568014 |
| 2519 | 1 | 65885647 | 65885769 | 0.02346075 | 0.023460753 |
| 2520 | 19 | 38879632 | 38879761 | −0.0234514 | 0.0234514 |
| 2521 | 1 | 111505942 | 111506111 | 0.02345047 | 0.023450473 |
| 2522 | 13 | 76055957 | 76056095 | −0.0233882 | 0.0233882 |
| 2523 | 13 | 39611840 | 39612164 | 0.0233848 | 0.023384801 |
| 2524 | 10 | 61469673 | 61469921 | 0.02335299 | 0.02335299 |
| 2525 | 1 | 223316399 | 223316735 | −0.0233472 | 0.0233472 |
| 2526 | 11 | 70115975 | 70116132 | 0.023341 | 0.023340999 |
| 2527 | 2 | 30142915 | 30143069 | −0.0232809 | 0.0232809 |
| 2528 | 3 | 52231772 | 52231912 | −0.0232581 | 0.0232581 |
| 2529 | 1 | 169337792 | 169337929 | −0.0232199 | 0.0232199 |
| 2530 | 17 | 58227217 | 58227332 | 0.02321444 | 0.023214442 |
| 2531 | 9 | 108147730 | 108148044 | 0.02319656 | 0.023196564 |
| 2532 | 18 | 18822499 | 18822647 | −0.023192 | 0.023192 |
| 2533 | 6 | 35887634 | 35887916 | 0.0231644 | 0.023164396 |
| 2534 | 1 | 16176306 | 16176463 | 0.02314221 | 0.02314221 |
| 2535 | 8 | 54794553 | 54794700 | 0.02313653 | 0.023136526 |
| 2536 | 3 | 28390598 | 28390707 | 0.02310647 | 0.023106469 |
| 2537 | 3 | 40351670 | 40351825 | 0.02306013 | 0.023060127 |
| 2538 | 10 | 121652127 | 121652460 | −0.0230201 | 0.0230201 |
| 2539 | 19 | 40724231 | 40724438 | 0.02294129 | 0.02294129 |
| 2540 | 15 | 66085018 | 66085170 | 0.02293335 | 0.022933349 |
| 2541 | 5 | 2754724 | 2756213 | −0.0229047 | 0.0229047 |
| 2542 | 7 | 65579862 | 65580003 | 0.02288654 | 0.022886542 |
| 2543 | 11 | 66511840 | 66512124 | 0.02280124 | 0.02280124 |
| 2544 | 7 | 84814578 | 84814635 | 0.02279731 | 0.022797314 |
| 2545 | 1 | 33283025 | 33283145 | −0.0227932 | 0.0227932 |
| 2546 | 8 | 134308967 | 134309123 | −0.0227727 | 0.0227727 |
| 2547 | 4 | 57843708 | 57843917 | −0.0227723 | 0.0227723 |
| 2548 | 21 | 46128759 | 46129714 | −0.0227439 | 0.0227439 |
| 2549 | 9 | 140024040 | 140024204 | 0.02272372 | 0.022723718 |
| 2550 | 16 | 21289689 | 21289904 | 0.0227166 | 0.022716603 |
| 2551 | 22 | 21356238 | 21356387 | −0.0227016 | 0.0227016 |
| 2552 | 15 | 72612551 | 72612933 | 0.02267795 | 0.022677952 |
| 2553 | 12 | 16035081 | 16035358 | 0.02263003 | 0.022630033 |
| 2554 | 11 | 121322557 | 121322793 | 0.02261976 | 0.022619761 |
| 2555 | 1 | 100998321 | 100998487 | 0.02252037 | 0.022520368 |
| 2556 | 18 | 30050251 | 30050472 | 0.02250917 | 0.022509165 |
| 2557 | 11 | 63637203 | 63637442 | −0.0224615 | 0.0224615 |
| 2558 | 1 | 151810418 | 151811675 | −0.02237 | 0.02237 |
| 2559 | 6 | 43603576 | 43603724 | −0.022352 | 0.022352 |
| 2560 | 12 | 109915324 | 109915540 | −0.0223302 | 0.0223302 |
| 2561 | 8 | 87521033 | 87521260 | 0.02232103 | 0.022321028 |
| 2562 | 7 | 105162520 | 105162775 | 0.02231012 | 0.022310118 |
| 2563 | 11 | 65819990 | 65820135 | 0.02226621 | 0.02226621 |
| 2564 | 17 | 36508845 | 36509000 | 0.02225937 | 0.022259373 |
| 2565 | 1 | 47133873 | 47134010 | −0.0222462 | 0.0222462 |
| 2566 | 16 | 23568327 | 23568893 | −0.0222364 | 0.0222364 |
| 2567 | 8 | 67025843 | 67026052 | 0.02221941 | 0.022219415 |
| 2568 | 21 | 36418125 | 36418949 | −0.0222162 | 0.0222162 |
| 2569 | 1 | 184005920 | 184006056 | −0.0221432 | 0.0221432 |
| 2570 | 16 | 28936976 | 28937096 | 0.02213923 | 0.022139225 |
| 2571 | 1 | 42500945 | 42501104 | 0.02207815 | 0.022078146 |
| 2572 | 1 | 39457021 | 39457271 | −0.0220738 | 0.0220738 |
| 2573 | 6 | 40554658 | 40554796 | −0.0220638 | 0.0220638 |
| 2574 | 4 | 184644247 | 184644388 | 0.02199367 | 0.021993667 |
| 2575 | 12 | 67909525 | 67909758 | 0.02197084 | 0.021970842 |
| 2576 | 19 | 36869953 | 36870253 | 0.02194781 | 0.021947806 |
| 2577 | 6 | 71998306 | 71998446 | −0.0219023 | 0.0219023 |
| 2578 | 2 | 216946320 | 216946453 | 0.02185418 | 0.02185418 |
| 2579 | 9 | 139010414 | 139010561 | −0.0218324 | 0.0218324 |
| 2580 | 2 | 190445398 | 190445632 | −0.0218173 | 0.0218173 |
| 2581 | 1 | 147806359 | 147806509 | 0.02179815 | 0.021798155 |
| 2582 | 4 | 4858408 | 4858563 | 0.02179152 | 0.021791518 |
| 2583 | 1 | 101713590 | 101713748 | 0.02178143 | 0.021781425 |
| 2584 | 8 | 54934895 | 54935150 | 0.02173994 | 0.021739942 |
| 2585 | 15 | 79724437 | 79724583 | 0.02167896 | 0.021678963 |
| 2586 | 16 | 30366214 | 30366379 | −0.0216687 | 0.0216687 |
| 2587 | 9 | 133329055 | 133329191 | −0.0216412 | 0.0216412 |
| 2588 | 17 | 64188323 | 64188463 | −0.0216408 | 0.0216408 |
| 2589 | 14 | 35885318 | 35885531 | 0.02161838 | 0.02161838 |
| 2590 | 11 | 4116372 | 4116516 | −0.0216136 | 0.0216136 |
| 2591 | 16 | 11031414 | 11031593 | 0.02159628 | 0.021596278 |
| 2592 | 14 | 75988403 | 75989233 | 0.02158948 | 0.021589476 |
| 2593 | 6 | 49430570 | 49431461 | −0.0215858 | 0.0215858 |
| 2594 | 20 | 277998 | 278130 | 0.02157904 | 0.021579044 |
| 2595 | 15 | 49913392 | 49913658 | −0.0215339 | 0.0215339 |
| 2596 | 17 | 28431689 | 28431969 | 0.02152368 | 0.021523676 |
| 2597 | 12 | 50898870 | 50899026 | 0.0214898 | 0.021489799 |
| 2598 | 4 | 111532608 | 111532744 | −0.0214339 | 0.0214339 |
| 2599 | 17 | 76125198 | 76125276 | 0.02139224 | 0.021392243 |
| 2600 | 8 | 74888998 | 74889133 | −0.0213896 | 0.0213896 |
| 2601 | 5 | 75843299 | 75843545 | −0.0213826 | 0.0213826 |
| 2602 | 16 | 2802113 | 2802463 | 0.0213728 | 0.021372795 |
| 2603 | 19 | 1847756 | 1847898 | 0.02134801 | 0.021348005 |
| 2604 | 11 | 67159041 | 67159194 | −0.0213249 | 0.0213249 |
| 2605 | 10 | 44101735 | 44102091 | −0.0213168 | 0.0213168 |
| 2606 | 12 | 22777951 | 22778160 | 0.0213025 | 0.021302499 |
| 2607 | 4 | 84256293 | 84256437 | −0.0211884 | 0.0211884 |
| 2608 | 6 | 1606302 | 1606438 | −0.021165 | 0.021165 |
| 2609 | 2 | 55845016 | 55845160 | 0.02112823 | 0.021128231 |
| 2610 | 1 | 48463226 | 48463368 | 0.02112134 | 0.021121338 |
| 2611 | 7 | 138145838 | 138145984 | −0.0211172 | 0.0211172 |
| 2612 | 6 | 52284727 | 52285045 | 0.02102885 | 0.021028851 |
| 2613 | 19 | 40030576 | 40030730 | −0.0210116 | 0.0210116 |
| 2614 | 8 | 101321544 | 101321690 | 0.02098044 | 0.020980436 |
| 2615 | 1 | 67895245 | 67895391 | 0.02092885 | 0.020928851 |
| 2616 | 10 | 98273634 | 98273788 | 0.02091535 | 0.020915345 |
| 2617 | 3 | 48481338 | 48481478 | −0.0209147 | 0.0209147 |
| 2618 | 5 | 76011224 | 76011377 | 0.02090658 | 0.020906584 |
| 2619 | 14 | 31889561 | 31889700 | −0.0208997 | 0.0208997 |
| 2620 | 1 | 115323051 | 115323203 | 0.02089169 | 0.020891695 |
| 2621 | 19 | 34012660 | 34013030 | 0.02085623 | 0.02085623 |
| 2622 | 2 | 210867205 | 210867416 | −0.0208481 | 0.0208481 |
| 2623 | 19 | 47551770 | 47552066 | −0.0208429 | 0.0208429 |
| 2624 | 6 | 36561874 | 36562055 | 0.02080695 | 0.02080695 |
| 2625 | 2 | 122494824 | 122494933 | −0.0207968 | 0.0207968 |
| 2626 | 5 | 156693501 | 156693647 | −0.0207841 | 0.0207841 |
| 2627 | 2 | 201729263 | 201729485 | −0.0207173 | 0.0207173 |
| 2628 | 15 | 91643464 | 91643613 | 0.02065521 | 0.020655214 |
| 2629 | 14 | 23067899 | 23068029 | −0.0205555 | 0.0205555 |
| 2630 | 16 | 86912390 | 86912706 | −0.0205474 | 0.0205474 |
| 2631 | 19 | 54982653 | 54982793 | −0.0205259 | 0.0205259 |
| 2632 | 2 | 115920397 | 115920548 | 0.02048347 | 0.020483466 |
| 2633 | 1 | 110692916 | 110693079 | −0.020471 | 0.020471 |
| 2634 | 14 | 89021398 | 89021536 | −0.0203769 | 0.0203769 |
| 2635 | 14 | 24584407 | 24584537 | 0.02036811 | 0.020368112 |
| 2636 | 2 | 26915814 | 26915964 | 0.02036723 | 0.020367225 |
| 2637 | 5 | 40486623 | 40486761 | −0.0203403 | 0.0203403 |
| 2638 | 8 | 42473948 | 42474217 | −0.0202476 | 0.0202476 |
| 2639 | 11 | 121593193 | 121593874 | −0.0202453 | 0.0202453 |
| 2640 | 11 | 64059228 | 64059664 | −0.0202436 | 0.0202436 |
| 2641 | 1 | 212587605 | 212587750 | −0.0202228 | 0.0202228 |
| 2642 | 5 | 157078662 | 157079115 | 0.020195 | 0.020194999 |
| 2643 | 4 | 168155057 | 168155191 | 0.0201572 | 0.020157203 |
| 2644 | 1 | 165667374 | 165667651 | 0.02014894 | 0.020148938 |
| 2645 | 9 | 6413775 | 6413923 | −0.0201268 | 0.0201268 |
| 2646 | 6 | 28626591 | 28626915 | 0.02004861 | 0.02004861 |
| 2647 | 3 | 44726832 | 44727262 | −0.0200478 | 0.0200478 |
| 2648 | 1 | 108508476 | 108508608 | 0.02003031 | 0.020030312 |
| 2649 | 5 | 171169396 | 171169565 | 0.01997537 | 0.019975367 |
| 2650 | 1 | 169862432 | 169862578 | −0.0199749 | 0.0199749 |
| 2651 | 1 | 155051086 | 155051234 | 0.01994095 | 0.019940955 |
| 2652 | 3 | 101497781 | 101498048 | 0.01992136 | 0.019921356 |
| 2653 | 3 | 71114691 | 71114839 | −0.0199149 | 0.0199149 |
| 2654 | 1 | 245132963 | 245133115 | 0.01987872 | 0.019878723 |
| 2655 | 17 | 7037013 | 7037159 | 0.01987496 | 0.019874961 |
| 2656 | 10 | 26727847 | 26727994 | −0.0198616 | 0.0198616 |
| 2657 | 15 | 96870152 | 96870298 | 0.01986072 | 0.019860716 |
| 2658 | 1 | 12226857 | 12227028 | 0.01981914 | 0.019819136 |
| 2659 | 22 | 38379427 | 38379575 | 0.01976113 | 0.019761127 |
| 2660 | 4 | 83955878 | 83956139 | −0.0197597 | 0.0197597 |
| 2661 | 1 | 33116426 | 33116566 | −0.0197462 | 0.0197462 |
| 2662 | 12 | 46662854 | 46663021 | 0.01969436 | 0.01969436 |
| 2663 | 3 | 12910147 | 12910535 | −0.019669 | 0.019669 |
| 2664 | 1 | 153931084 | 153931219 | −0.0196689 | 0.0196689 |
| 2665 | 5 | 37839849 | 37839995 | −0.0196431 | 0.0196431 |
| 2666 | 7 | 68895437 | 68895749 | −0.0196319 | 0.0196319 |
| 2667 | 22 | 24038320 | 24038966 | −0.0195989 | 0.0195989 |
| 2668 | 22 | 17566738 | 17567019 | 0.0195843 | 0.0195843 |
| 2669 | 6 | 2793935 | 2794113 | −0.0195821 | 0.0195821 |
| 2670 | 2 | 26257709 | 26257868 | −0.0194284 | 0.0194284 |
| 2671 | 19 | 38184192 | 38184339 | −0.0194175 | 0.0194175 |
| 2672 | 14 | 91716335 | 91716687 | −0.0193566 | 0.0193566 |
| 2673 | 14 | 100149888 | 100150069 | −0.0193244 | 0.0193244 |
| 2674 | 1 | 151119447 | 151119605 | 0.01927013 | 0.019270125 |
| 2675 | 1 | 201475873 | 201476015 | 0.0192485 | 0.019248495 |
| 2676 | 1 | 145209863 | 145209986 | 0.01924597 | 0.01924597 |
| 2677 | 6 | 26273517 | 26273615 | 0.01924396 | 0.01924396 |
| 2678 | 4 | 106068527 | 106068670 | 0.01918998 | 0.019189981 |
| 2679 | 10 | 81107020 | 81107333 | −0.0191421 | 0.0191421 |
| 2680 | 16 | 2255810 | 2255951 | −0.0191042 | 0.0191042 |
| 2681 | 1 | 52083118 | 52083265 | 0.01906849 | 0.019068491 |
| 2682 | 14 | 98190662 | 98191119 | −0.0190021 | 0.0190021 |
| 2683 | 7 | 140753500 | 140753673 | 0.01898333 | 0.018983335 |
| 2684 | 4 | 174255054 | 174255186 | −0.0189747 | 0.0189747 |
| 2685 | 2 | 172379547 | 172379691 | 0.0189382 | 0.018938201 |
| 2686 | 20 | 35491632 | 35491911 | 0.01893023 | 0.018930234 |
| 2687 | 17 | 80292648 | 80292780 | −0.0188871 | 0.0188871 |
| 2688 | 5 | 122372258 | 122372397 | 0.01888632 | 0.018886317 |
| 2689 | 17 | 79603688 | 79603834 | 0.01886997 | 0.018869972 |
| 2690 | 10 | 35625925 | 35626055 | −0.0188112 | 0.0188112 |
| 2691 | 19 | 48281785 | 48281931 | −0.0188087 | 0.0188087 |
| 2692 | 4 | 140004994 | 140005145 | −0.0187507 | 0.0187507 |
| 2693 | 9 | 125026890 | 125027134 | 0.01873697 | 0.018736971 |
| 2694 | 1 | 236230208 | 236230363 | −0.0187363 | 0.0187363 |
| 2695 | 6 | 70000086 | 70000358 | 0.01872869 | 0.018728692 |
| 2696 | 7 | 117824338 | 117824481 | 0.01872633 | 0.018726331 |
| 2697 | 18 | 74779338 | 74779666 | 0.01871866 | 0.018718659 |
| 2698 | 9 | 91136350 | 91136498 | 0.01869856 | 0.01869856 |
| 2699 | 14 | 23058034 | 23058214 | 0.01862606 | 0.018626056 |
| 2700 | 17 | 20811780 | 20811982 | −0.0184939 | 0.0184939 |
| 2701 | 11 | 75999234 | 75999401 | 0.01848257 | 0.018482573 |
| 2702 | 21 | 43092039 | 43092242 | −0.0184715 | 0.0184715 |
| 2703 | 3 | 131753789 | 131753928 | 0.01842236 | 0.018422362 |
| 2704 | 5 | 43064829 | 43064973 | −0.0184109 | 0.0184109 |
| 2705 | 5 | 88179350 | 88179456 | 0.01837849 | 0.018378492 |
| 2706 | 19 | 16308865 | 16308991 | −0.0183523 | 0.0183523 |
| 2707 | 12 | 104457815 | 104457962 | −0.0183376 | 0.0183376 |
| 2708 | 20 | 55841966 | 55842431 | −0.0182857 | 0.0182857 |
| 2709 | 9 | 3181583 | 3181745 | −0.0182724 | 0.0182724 |
| 2710 | 3 | 150127476 | 150127626 | −0.0182556 | 0.0182556 |
| 2711 | 3 | 121553752 | 121553852 | 0.01824866 | 0.018248658 |
| 2712 | 2 | 144695177 | 144695327 | 0.01820483 | 0.018204835 |
| 2713 | 14 | 70079314 | 70079472 | −0.0181713 | 0.0181713 |
| 2714 | 16 | 81040311 | 81040454 | 0.01809523 | 0.01809523 |
| 2715 | 3 | 150920932 | 150921088 | 0.01806318 | 0.018063181 |
| 2716 | 12 | 105089565 | 105089703 | 0.01805487 | 0.01805487 |
| 2717 | 3 | 75484134 | 75484244 | 0.01804936 | 0.018049365 |
| 2718 | 10 | 72141846 | 72141991 | 0.01804517 | 0.018045165 |
| 2719 | 10 | 38146447 | 38146658 | 0.01797908 | 0.017979077 |
| 2720 | 6 | 112194619 | 112194932 | −0.0179765 | 0.0179765 |
| 2721 | 11 | 111385416 | 111385561 | 0.01796689 | 0.017966889 |
| 2722 | 1 | 203274624 | 203274764 | 0.01795507 | 0.017955069 |
| 2723 | 3 | 101568966 | 101569114 | −0.0178921 | 0.0178921 |
| 2724 | 20 | 20432999 | 20433391 | −0.0178811 | 0.0178811 |
| 2725 | 11 | 61129195 | 61129511 | 0.01787669 | 0.017876686 |
| 2726 | 11 | 119455424 | 119455702 | 0.01786907 | 0.017869071 |
| 2727 | 7 | 99036419 | 99036592 | 0.01786881 | 0.017868805 |
| 2728 | 9 | 2015559 | 2015693 | −0.0177815 | 0.0177815 |
| 2729 | 16 | 89787410 | 89787603 | 0.01770711 | 0.017707113 |
| 2730 | 1 | 37980136 | 37980660 | 0.01767779 | 0.017677787 |
| 2731 | 1 | 93913397 | 93913540 | −0.01766 | 0.01766 |
| 2732 | 17 | 46724059 | 46724321 | 0.01763011 | 0.017630107 |
| 2733 | X | 117959949 | 117960082 | 0.01762502 | 0.017625023 |
| 2734 | 12 | 123874378 | 123874523 | 0.01760501 | 0.017605013 |
| 2735 | 1 | 113008821 | 113009061 | 0.01760072 | 0.017600718 |
| 2736 | 19 | 53496948 | 53497102 | −0.0176003 | 0.0176003 |
| 2737 | 2 | 154335108 | 154335261 | 0.01759629 | 0.017596285 |
| 2738 | 5 | 122111278 | 122111418 | 0.01756211 | 0.017562112 |
| 2739 | 17 | 30335662 | 30335810 | −0.0175376 | 0.0175376 |
| 2740 | 6 | 17281723 | 17281908 | −0.0174915 | 0.0174915 |
| 2741 | 16 | 89985085 | 89985230 | −0.0174882 | 0.0174882 |
| 2742 | 1 | 24104548 | 24104724 | 0.01745725 | 0.017457254 |
| 2743 | 1 | 207494518 | 207494800 | 0.01744095 | 0.017440949 |
| 2744 | 15 | 49912943 | 49913089 | −0.0173522 | 0.0173522 |
| 2745 | 8 | 23267968 | 23268121 | −0.0172833 | 0.0172833 |
| 2746 | 17 | 80023363 | 80023508 | 0.01727894 | 0.017278936 |
| 2747 | 9 | 100614897 | 100615487 | −0.017267 | 0.017267 |
| 2748 | 12 | 4647551 | 4647693 | 0.01725164 | 0.017251636 |
| 2749 | 3 | 9691736 | 9691881 | −0.0172488 | 0.0172488 |
| 2750 | 17 | 45867261 | 45867399 | 0.01722136 | 0.017221362 |
| 2751 | 17 | 47841508 | 47841609 | −0.0172146 | 0.0172146 |
| 2752 | 12 | 113012958 | 113013417 | −0.0171861 | 0.0171861 |
| 2753 | 16 | 17087359 | 17087575 | 0.01702782 | 0.01702782 |
| 2754 | 11 | 70244625 | 70244759 | −0.0170085 | 0.0170085 |
| 2755 | 2 | 113522129 | 113522274 | −0.0169979 | 0.0169979 |
| 2756 | 12 | 125478391 | 125478529 | −0.016977 | 0.016977 |
| 2757 | 15 | 101817837 | 101817993 | 0.01697107 | 0.016971073 |
| 2758 | 12 | 128850423 | 128850782 | −0.0169542 | 0.0169542 |
| 2759 | 17 | 80358725 | 80358976 | −0.0169186 | 0.0169186 |
| 2760 | 4 | 184319955 | 184320103 | 0.0169106 | 0.016910603 |
| 2761 | 11 | 16760610 | 16760750 | −0.016881 | 0.016881 |
| 2762 | 17 | 71287256 | 71287389 | −0.016822 | 0.016822 |
| 2763 | 22 | 50683418 | 50683632 | 0.0168056 | 0.016805597 |
| 2764 | 17 | 37353578 | 37353721 | 0.01676793 | 0.016767933 |
| 2765 | 5 | 79032472 | 79032713 | −0.0167637 | 0.0167637 |
| 2766 | 15 | 74220176 | 74220315 | 0.01672382 | 0.01672382 |
| 2767 | 1 | 166845610 | 166845817 | −0.0166787 | 0.0166787 |
| 2768 | 11 | 2114372 | 2114654 | −0.0166673 | 0.0166673 |
| 2769 | 6 | 70506464 | 70506564 | 0.0166582 | 0.016658202 |
| 2770 | 11 | 30607883 | 30608061 | −0.0165643 | 0.0165643 |
| 2771 | X | 48327173 | 48327388 | 0.01653563 | 0.016535625 |
| 2772 | 7 | 127176826 | 127176964 | 0.01649775 | 0.016497748 |
| 2773 | 5 | 92930502 | 92931263 | −0.0164932 | 0.0164932 |
| 2774 | 1 | 236445146 | 236445281 | 0.01649039 | 0.01649039 |
| 2775 | 4 | 108641523 | 108641670 | −0.0164798 | 0.0164798 |
| 2776 | 18 | 12884437 | 12884595 | 0.01647476 | 0.016474762 |
| 2777 | 18 | 13136285 | 13137749 | −0.0164327 | 0.0164327 |
| 2778 | 2 | 118943187 | 118944212 | −0.0164268 | 0.0164268 |
| 2779 | 6 | 36808165 | 36808564 | −0.0164242 | 0.0164242 |
| 2780 | 3 | 119814043 | 119814189 | 0.01639928 | 0.016399281 |
| 2781 | 11 | 58826041 | 58826186 | 0.01636017 | 0.016360169 |
| 2782 | 5 | 141061891 | 141062013 | 0.01628918 | 0.016289177 |
| 2783 | 10 | 2967855 | 2968163 | −0.016288 | 0.016288 |
| 2784 | 12 | 15111641 | 15112036 | −0.0162734 | 0.0162734 |
| 2785 | 8 | 12516458 | 12516587 | 0.01627078 | 0.016270777 |
| 2786 | 20 | 54987051 | 54987549 | −0.0162592 | 0.0162592 |
| 2787 | 1 | 173793860 | 173794145 | −0.016202 | 0.016202 |
| 2788 | 14 | 64805578 | 64805723 | 0.01618509 | 0.016185086 |
| 2789 | 1 | 117209867 | 117210011 | 0.01618076 | 0.016180762 |
| 2790 | 9 | 83728438 | 83728775 | −0.016169 | 0.016169 |
| 2791 | 22 | 30753058 | 30753200 | 0.01614158 | 0.016141575 |
| 2792 | 1 | 70687005 | 70687210 | −0.0161327 | 0.0161327 |
| 2793 | 2 | 64067462 | 64067610 | 0.01609856 | 0.016098556 |
| 2794 | 1 | 34629479 | 34629622 | −0.0160943 | 0.0160943 |
| 2795 | 1 | 203830981 | 203831129 | 0.01608514 | 0.016085139 |
| 2796 | 10 | 72142226 | 72142368 | 0.01606241 | 0.016062414 |
| 2797 | 19 | 53141550 | 53141684 | 0.01605872 | 0.016058724 |
| 2798 | 2 | 73403095 | 73403243 | 0.01602628 | 0.016026284 |
| 2799 | 6 | 86159612 | 86159745 | −0.0159967 | 0.0159967 |
| 2800 | 11 | 67722832 | 67722976 | 0.01598466 | 0.015984665 |
| 2801 | 15 | 81594294 | 81594514 | −0.0159355 | 0.0159355 |
| 2802 | 10 | 124905586 | 124906186 | −0.0159344 | 0.0159344 |
| 2803 | 10 | 134973968 | 134974100 | −0.0159296 | 0.0159296 |
| 2804 | 1 | 90286215 | 90286405 | 0.01592672 | 0.01592672 |
| 2805 | 5 | 32211340 | 32211527 | −0.0158925 | 0.0158925 |
| 2806 | 1 | 167407480 | 167407680 | −0.0158581 | 0.0158581 |
| 2807 | 14 | 24020113 | 24020261 | 0.01585517 | 0.015855166 |
| 2808 | 13 | 41635283 | 41635432 | 0.01579994 | 0.015799938 |
| 2809 | 11 | 91957046 | 91957196 | 0.01570201 | 0.015702014 |
| 2810 | 2 | 182548731 | 182548882 | 0.01568994 | 0.015689936 |
| 2811 | 9 | 95993559 | 95993979 | −0.0156858 | 0.0156858 |
| 2812 | 17 | 58217277 | 58217428 | 0.01568002 | 0.015680021 |
| 2813 | 12 | 57623296 | 57623529 | −0.0156792 | 0.0156792 |
| 2814 | 2 | 210337183 | 210337327 | −0.0156737 | 0.0156737 |
| 2815 | 12 | 133287695 | 133287871 | 0.01565569 | 0.015655692 |
| 2816 | 7 | 121784309 | 121784454 | −0.0156063 | 0.0156063 |
| 2817 | 12 | 130684123 | 130684267 | −0.0156022 | 0.0156022 |
| 2818 | 19 | 42058230 | 42058358 | 0.01559837 | 0.015598373 |
| 2819 | 1 | 32292562 | 32292701 | −0.0155528 | 0.0155528 |
| 2820 | 19 | 40732056 | 40732432 | −0.015545 | 0.015545 |
| 2821 | 12 | 102513635 | 102513846 | 0.01552311 | 0.015523113 |
| 2822 | 12 | 110152073 | 110152248 | 0.01549407 | 0.015494072 |
| 2823 | 4 | 178363954 | 178364113 | −0.0154637 | 0.0154637 |
| 2824 | 19 | 4769556 | 4769677 | 0.01544751 | 0.015447513 |
| 2825 | 1 | 41847294 | 41847853 | −0.0154117 | 0.0154117 |
| 2826 | 8 | 145150315 | 145150454 | −0.0154026 | 0.0154026 |
| 2827 | 19 | 49140570 | 49140889 | 0.01537572 | 0.015375721 |
| 2828 | 6 | 112314157 | 112314306 | 0.0153705 | 0.015370501 |
| 2829 | 15 | 81595261 | 81595370 | 0.01536035 | 0.015360346 |
| 2830 | 20 | 33543404 | 33543836 | 0.01535164 | 0.015351641 |
| 2831 | 17 | 6659292 | 6659443 | 0.01534454 | 0.015344542 |
| 2832 | 11 | 116724577 | 116724762 | 0.01532065 | 0.015320647 |
| 2833 | 10 | 104192198 | 104192302 | −0.0153026 | 0.0153026 |
| 2834 | 12 | 46120541 | 46120696 | 0.01526976 | 0.015269762 |
| 2835 | 14 | 91883970 | 91884133 | 0.01523729 | 0.015237293 |
| 2836 | 8 | 67624680 | 67624815 | 0.01519778 | 0.015197784 |
| 2837 | 4 | 146100519 | 146100653 | −0.01518 | 0.01518 |
| 2838 | 6 | 70505949 | 70506107 | −0.0151785 | 0.0151785 |
| 2839 | 13 | 113597414 | 113597562 | −0.0151586 | 0.0151586 |
| 2840 | 11 | 13689409 | 13689706 | 0.01514344 | 0.015143439 |
| 2841 | 6 | 159240473 | 159240608 | 0.01512026 | 0.015120261 |
| 2842 | 17 | 28562605 | 28562753 | −0.0150921 | 0.0150921 |
| 2843 | 10 | 91011105 | 91011249 | 0.01504783 | 0.015047826 |
| 2844 | 12 | 31478565 | 31478704 | −0.0149802 | 0.0149802 |
| 2845 | 2 | 10262762 | 10262954 | 0.014972 | 0.014972004 |
| 2846 | 12 | 32908449 | 32908590 | 0.01496477 | 0.014964772 |
| 2847 | 1 | 150207060 | 150207353 | 0.01495595 | 0.014955949 |
| 2848 | 6 | 10694565 | 10694710 | −0.0149029 | 0.0149029 |
| 2849 | 21 | 30364978 | 30365115 | 0.01489682 | 0.014896823 |
| 2850 | 20 | 33999759 | 33999973 | 0.01489056 | 0.014890561 |
| 2851 | 21 | 38071832 | 38071965 | 0.01488621 | 0.01488621 |
| 2852 | 9 | 77702549 | 77702691 | 0.01486747 | 0.01486747 |
| 2853 | 1 | 46806485 | 46806632 | 0.01484237 | 0.014842368 |
| 2854 | 18 | 25029212 | 25029355 | 0.01483202 | 0.014832023 |
| 2855 | 6 | 82463696 | 82463851 | −0.014804 | 0.014804 |
| 2856 | 17 | 9142796 | 9143120 | −0.0147925 | 0.0147925 |
| 2857 | 1 | 40157010 | 40157306 | 0.01473519 | 0.014735193 |
| 2858 | 11 | 13032300 | 13032678 | −0.0147273 | 0.0147273 |
| 2859 | 19 | 58838136 | 58838506 | −0.0147094 | 0.0147094 |
| 2860 | 10 | 124220654 | 124220792 | 0.01470765 | 0.01470765 |
| 2861 | 14 | 21439627 | 21439756 | −0.0146889 | 0.0146889 |
| 2862 | 3 | 150126471 | 150126605 | 0.01467359 | 0.014673588 |
| 2863 | 12 | 9910761 | 9910897 | −0.0145682 | 0.0145682 |
| 2864 | 6 | 106565485 | 106565670 | −0.0145377 | 0.0145377 |
| 2865 | 11 | 61731024 | 61731156 | 0.01453565 | 0.014535653 |
| 2866 | 2 | 160143463 | 160143600 | 0.01452022 | 0.014520217 |
| 2867 | 16 | 14726923 | 14727069 | −0.0145181 | 0.0145181 |
| 2868 | 4 | 148653544 | 148653692 | 0.01450869 | 0.014508688 |
| 2869 | 12 | 48153048 | 48153183 | 0.01449345 | 0.014493448 |
| 2870 | 15 | 78326965 | 78327102 | 0.01448715 | 0.014487151 |
| 2871 | 2 | 64068782 | 64069072 | 0.01444836 | 0.014448357 |
| 2872 | 1 | 6418980 | 6419127 | −0.0144455 | 0.0144455 |
| 2873 | 8 | 84051827 | 84052000 | −0.0144289 | 0.0144289 |
| 2874 | 8 | 121821383 | 121821525 | −0.0144288 | 0.0144288 |
| 2875 | 13 | 114875969 | 114876412 | 0.01440439 | 0.014404385 |
| 2876 | 15 | 65426126 | 65426271 | 0.01439068 | 0.014390677 |
| 2877 | 12 | 125027865 | 125028008 | 0.01437335 | 0.014373354 |
| 2878 | 14 | 31926698 | 31926875 | −0.0143614 | 0.0143614 |
| 2879 | 3 | 171176830 | 171177025 | −0.0143135 | 0.0143135 |
| 2880 | 15 | 99602732 | 99602875 | 0.01428469 | 0.014284686 |
| 2881 | 18 | 19749464 | 19749612 | 0.01427225 | 0.014272247 |
| 2882 | 17 | 42907858 | 42908008 | −0.0142138 | 0.0142138 |
| 2883 | 3 | 31574228 | 31574342 | −0.0141456 | 0.0141456 |
| 2884 | 19 | 5791078 | 5791228 | −0.0141113 | 0.0141113 |
| 2885 | 12 | 123237105 | 123237251 | 0.01411125 | 0.014111251 |
| 2886 | 15 | 94530468 | 94530612 | 0.014094 | 0.014094 |
| 2887 | 4 | 84256131 | 84256279 | 0.01405509 | 0.014055091 |
| 2888 | 18 | 57574436 | 57574579 | 0.01404412 | 0.014044124 |
| 2889 | 8 | 94753053 | 94753342 | −0.0139335 | 0.0139335 |
| 2890 | 1 | 204042701 | 204042848 | 0.01387189 | 0.013871885 |
| 2891 | 19 | 36485755 | 36485842 | 0.01383742 | 0.013837417 |
| 2892 | 1 | 165797094 | 165797240 | 0.01382761 | 0.013827607 |
| 2893 | 20 | 62072532 | 62072901 | −0.0138197 | 0.0138197 |
| 2894 | 3 | 43732223 | 43732405 | −0.0138027 | 0.0138027 |
| 2895 | 17 | 42299082 | 42299245 | 0.0137242 | 0.013724197 |
| 2896 | 3 | 45635635 | 45635760 | −0.0137013 | 0.0137013 |
| 2897 | 1 | 183604433 | 183604584 | 0.01369331 | 0.013693315 |
| 2898 | 4 | 81256713 | 81256971 | −0.0136656 | 0.0136656 |
| 2899 | 17 | 58603348 | 58603490 | 0.01366347 | 0.013663472 |
| 2900 | 18 | 9118553 | 9118708 | −0.0136313 | 0.0136313 |
| 2901 | 2 | 96971119 | 96971256 | −0.0135521 | 0.0135521 |
| 2902 | 7 | 101071824 | 101071964 | −0.0135312 | 0.0135312 |
| 2903 | 2 | 25496319 | 25496464 | 0.01352145 | 0.013521448 |
| 2904 | 12 | 131200452 | 131200616 | 0.01348895 | 0.013488948 |
| 2905 | 14 | 37133011 | 37133365 | −0.0134873 | 0.0134873 |
| 2906 | 2 | 201374816 | 201374977 | −0.0134527 | 0.0134527 |
| 2907 | 1 | 247570786 | 247570938 | −0.0134305 | 0.0134305 |
| 2908 | 7 | 142494834 | 142495050 | −0.013324 | 0.013324 |
| 2909 | 1 | 91172073 | 91172798 | −0.0133138 | 0.0133138 |
| 2910 | 7 | 99746441 | 99746699 | −0.0133065 | 0.0133065 |
| 2911 | 17 | 7240450 | 7240718 | −0.0132581 | 0.0132581 |
| 2912 | 9 | 14346321 | 14346668 | −0.0132451 | 0.0132451 |
| 2913 | 4 | 141348227 | 141348367 | −0.0132098 | 0.0132098 |
| 2914 | 1 | 150552527 | 150552705 | −0.0132047 | 0.0132047 |
| 2915 | 12 | 132568909 | 132569032 | −0.0132 | 0.0132 |
| 2916 | 20 | 61557896 | 61558074 | −0.0131709 | 0.0131709 |
| 2917 | 3 | 132378526 | 132378674 | −0.0130323 | 0.0130323 |
| 2918 | 1 | 202777380 | 202777693 | 0.0129624 | 0.012962399 |
| 2919 | 11 | 67250548 | 67250694 | 0.01288823 | 0.012888227 |
| 2920 | 1 | 242947623 | 242947769 | 0.01285377 | 0.012853774 |
| 2921 | 6 | 90539724 | 90539870 | 0.01285363 | 0.012853625 |
| 2922 | 7 | 130080767 | 130080909 | −0.0128418 | 0.0128418 |
| 2923 | 20 | 55503332 | 55503472 | −0.0128149 | 0.0128149 |
| 2924 | 4 | 25162403 | 25162548 | −0.0127933 | 0.0127933 |
| 2925 | 15 | 62123384 | 62123541 | −0.0127503 | 0.0127503 |
| 2926 | 11 | 4628963 | 4629104 | 0.01267698 | 0.01267698 |
| 2927 | 3 | 113233977 | 113234142 | −0.012672 | 0.012672 |
| 2928 | 10 | 115439187 | 115439462 | 0.01266379 | 0.012663795 |
| 2929 | 3 | 98620494 | 98620742 | 0.01265166 | 0.012651658 |
| 2930 | 3 | 62359319 | 62359455 | −0.0126516 | 0.0126516 |
| 2931 | 11 | 77300485 | 77300647 | 0.01264039 | 0.012640388 |
| 2932 | 1 | 157125982 | 157126135 | 0.01262797 | 0.012627969 |
| 2933 | 7 | 92861702 | 92861908 | −0.0126277 | 0.0126277 |
| 2934 | 20 | 24451813 | 24451958 | −0.0125946 | 0.0125946 |
| 2935 | 19 | 7183007 | 7183221 | −0.0125745 | 0.0125745 |
| 2936 | 4 | 1161080 | 1161218 | 0.0125701 | 0.012570103 |
| 2937 | 4 | 68566367 | 68566515 | −0.0125655 | 0.0125655 |
| 2938 | 3 | 131221619 | 131221934 | 0.01256336 | 0.01256336 |
| 2939 | 17 | 42836675 | 42836799 | −0.0125287 | 0.0125287 |
| 2940 | 21 | 27542965 | 27543205 | 0.01251391 | 0.012513913 |
| 2941 | 11 | 12863803 | 12864020 | 0.01251174 | 0.012511745 |
| 2942 | 20 | 34824571 | 34824717 | 0.01250931 | 0.012509306 |
| 2943 | 10 | 94822837 | 94822976 | −0.0125061 | 0.0125061 |
| 2944 | 9 | 99382004 | 99382138 | −0.0124868 | 0.0124868 |
| 2945 | 17 | 1161898 | 1162142 | −0.012457 | 0.012457 |
| 2946 | 17 | 65713511 | 65713606 | 0.0124462 | 0.012446202 |
| 2947 | 8 | 120886765 | 120886911 | 0.01241499 | 0.012414992 |
| 2948 | 13 | 80916990 | 80917128 | 0.01236037 | 0.012360372 |
| 2949 | 7 | 30028336 | 30028478 | −0.012339 | 0.012339 |
| 2950 | 2 | 175191802 | 175192657 | −0.0123315 | 0.0123315 |
| 2951 | 14 | 102275953 | 102276097 | 0.01230992 | 0.012309916 |
| 2952 | 6 | 121758575 | 121758732 | 0.0123077 | 0.012307703 |
| 2953 | 6 | 17600680 | 17600819 | −0.0123072 | 0.0123072 |
| 2954 | 8 | 30013637 | 30013757 | −0.012295 | 0.012295 |
| 2955 | 2 | 165697943 | 165698179 | −0.0122851 | 0.0122851 |
| 2956 | 1 | 53017887 | 53018033 | 0.0122792 | 0.012279202 |
| 2957 | 14 | 105559478 | 105559635 | 0.01226005 | 0.01226005 |
| 2958 | 19 | 2273764 | 2273910 | 0.01223183 | 0.012231827 |
| 2959 | 8 | 133787846 | 133787993 | 0.01218939 | 0.012189393 |
| 2960 | 2 | 163027449 | 163027598 | −0.0121172 | 0.0121172 |
| 2961 | 8 | 126010390 | 126010537 | −0.0120836 | 0.0120836 |
| 2962 | 19 | 36705897 | 36706164 | 0.01206489 | 0.012064886 |
| 2963 | 1 | 160832528 | 160832688 | −0.0120639 | 0.0120639 |
| 2964 | 2 | 202097051 | 202097200 | −0.0120155 | 0.0120155 |
| 2965 | 4 | 9783114 | 9783468 | −0.0119573 | 0.0119573 |
| 2966 | 7 | 4910958 | 4911105 | −0.0119502 | 0.0119502 |
| 2967 | 20 | 1014652 | 1014806 | −0.0119454 | 0.0119454 |
| 2968 | 18 | 54318245 | 54318575 | −0.011915 | 0.011915 |
| 2969 | 11 | 72145613 | 72145762 | −0.0119097 | 0.0119097 |
| 2970 | 17 | 73663330 | 73663636 | −0.011864 | 0.011864 |
| 2971 | 5 | 78280803 | 78280943 | −0.0118482 | 0.0118482 |
| 2972 | 3 | 178865609 | 178865762 | −0.0118474 | 0.0118474 |
| 2973 | 1 | 245605032 | 245605341 | −0.0118302 | 0.0118302 |
| 2974 | 1 | 27960512 | 27960651 | 0.01182747 | 0.011827473 |
| 2975 | 3 | 133392864 | 133393636 | −0.0117542 | 0.0117542 |
| 2976 | 11 | 110581803 | 110581940 | −0.0117121 | 0.0117121 |
| 2977 | 5 | 87976215 | 87976356 | −0.0117037 | 0.0117037 |
| 2978 | 6 | 91296590 | 91296855 | −0.0116926 | 0.0116926 |
| 2979 | 5 | 121297432 | 121297749 | −0.0116777 | 0.0116777 |
| 2980 | 5 | 162931335 | 162931970 | −0.0116639 | 0.0116639 |
| 2981 | 12 | 72234236 | 72234385 | 0.01162996 | 0.011629959 |
| 2982 | 21 | 34444263 | 34444463 | 0.01162112 | 0.011621118 |
| 2983 | 15 | 63334937 | 63335106 | −0.0116176 | 0.0116176 |
| 2984 | 1 | 201708737 | 201709877 | −0.0115959 | 0.0115959 |
| 2985 | 14 | 71788041 | 71788187 | −0.0115617 | 0.0115617 |
| 2986 | 1 | 224804318 | 224804463 | 0.01145408 | 0.011454081 |
| 2987 | 7 | 27224793 | 27224935 | −0.0114439 | 0.0114439 |
| 2988 | 20 | 25062369 | 25062513 | −0.0114418 | 0.0114418 |
| 2989 | 14 | 31677141 | 31677358 | 0.01140987 | 0.011409872 |
| 2990 | 16 | 87814120 | 87814332 | 0.0113463 | 0.0113463 |
| 2991 | 22 | 44257942 | 44258395 | −0.0113239 | 0.0113239 |
| 2992 | 12 | 4382907 | 4383099 | 0.01130431 | 0.011304306 |
| 2993 | 19 | 13984012 | 13984158 | 0.01128216 | 0.011282157 |
| 2994 | 7 | 134331341 | 134331478 | −0.0111955 | 0.0111955 |
| 2995 | 14 | 89897129 | 89897438 | −0.0111329 | 0.0111329 |
| 2996 | 2 | 29234484 | 29234791 | −0.0111326 | 0.0111326 |
| 2997 | 1 | 3566408 | 3566629 | −0.0111184 | 0.0111184 |
| 2998 | 12 | 47473134 | 47473270 | −0.0110648 | 0.0110648 |
| 2999 | 19 | 36135683 | 36135833 | −0.0109403 | 0.0109403 |
| 3000 | 14 | 53618955 | 53619114 | 0.01092234 | 0.010922343 |
| 3001 | 8 | 5820983 | 5821136 | −0.0109106 | 0.0109106 |
| 3002 | 14 | 50065136 | 50065415 | 0.01091021 | 0.010910213 |
| 3003 | 4 | 57843464 | 57843622 | 0.01090102 | 0.010901023 |
| 3004 | 17 | 79988670 | 79988822 | 0.01089864 | 0.010898642 |
| 3005 | 1 | 227975007 | 227975151 | −0.0108833 | 0.0108833 |
| 3006 | 1 | 226187402 | 226187548 | 0.0108541 | 0.010854096 |
| 3007 | 3 | 49467109 | 49467259 | −0.0108512 | 0.0108512 |
| 3008 | 8 | 1978849 | 1978989 | 0.01083754 | 0.010837536 |
| 3009 | 2 | 230476489 | 230476632 | −0.010832 | 0.010832 |
| 3010 | 15 | 83735792 | 83735997 | 0.01080995 | 0.010809948 |
| 3011 | 6 | 28227316 | 28227487 | 0.01079459 | 0.010794592 |
| 3012 | 2 | 114261909 | 114262055 | 0.01076451 | 0.010764506 |
| 3013 | 12 | 113914431 | 113914577 | −0.0107066 | 0.0107066 |
| 3014 | 9 | 106856598 | 106856792 | −0.0106893 | 0.0106893 |
| 3015 | 1 | 235805573 | 235805926 | 0.01068829 | 0.010688286 |
| 3016 | 16 | 55514390 | 55514537 | −0.0106867 | 0.0106867 |
| 3017 | 4 | 109093138 | 109093298 | 0.01066571 | 0.010665715 |
| 3018 | 8 | 6899737 | 6899927 | −0.0105865 | 0.0105865 |
| 3019 | 9 | 14347243 | 14348104 | 0.01057781 | 0.010577808 |
| 3020 | 1 | 110754007 | 110754163 | 0.0105517 | 0.010551698 |
| 3021 | 1 | 5526593 | 5526803 | −0.0105325 | 0.0105325 |
| 3022 | 9 | 138852426 | 138852579 | −0.0105292 | 0.0105292 |
| 3023 | 8 | 67837612 | 67837751 | 0.01047289 | 0.010472886 |
| 3024 | 4 | 123843503 | 123843652 | 0.01044816 | 0.010448159 |
| 3025 | 19 | 18220612 | 18220698 | −0.0104091 | 0.0104091 |
| 3026 | 17 | 73782031 | 73782274 | −0.0103667 | 0.0103667 |
| 3027 | 1 | 19638334 | 19638479 | −0.0103541 | 0.0103541 |
| 3028 | 6 | 29944691 | 29944936 | 0.01034382 | 0.01034382 |
| 3029 | 5 | 98269155 | 98269395 | −0.010268 | 0.010268 |
| 3030 | 2 | 120770392 | 120770539 | −0.0102533 | 0.0102533 |
| 3031 | 6 | 26365142 | 26365273 | −0.0101961 | 0.0101961 |
| 3032 | 1 | 160951749 | 160952185 | −0.0101927 | 0.0101927 |
| 3033 | 16 | 18573142 | 18573251 | −0.0101473 | 0.0101473 |
| 3034 | 1 | 179923584 | 179923728 | −0.0101347 | 0.0101347 |
| 3035 | 14 | 68086805 | 68086952 | 0.01012744 | 0.010127441 |
| 3036 | 9 | 103235966 | 103236121 | −0.0100793 | 0.0100793 |
| 3037 | 1 | 26202361 | 26202513 | −0.0100522 | 0.0100522 |
| 3038 | 10 | 92617985 | 92618131 | −0.0100059 | 0.0100059 |
| 3039 | 1 | 155057401 | 155057510 | 0.00998632 | 0.009986317 |
| 3040 | 2 | 26467239 | 26467375 | −0.009936 | 0.00993605 |
| 3041 | 11 | 57298463 | 57298603 | 0.00992353 | 0.009923533 |
| 3042 | 1 | 59249731 | 59249911 | 0.00989535 | 0.009895352 |
| 3043 | 5 | 180687993 | 180688137 | −0.0098866 | 0.00988663 |
| 3044 | 12 | 104851831 | 104851978 | −0.0098861 | 0.00988607 |
| 3045 | 19 | 19322600 | 19322740 | −0.0098822 | 0.00988223 |
| 3046 | 14 | 68750295 | 68750440 | −0.0098761 | 0.0098761 |
| 3047 | 5 | 1315967 | 1316220 | 0.00987534 | 0.009875336 |
| 3048 | X | 94975778 | 94976025 | 0.00987476 | 0.009874757 |
| 3049 | 17 | 46810612 | 46810852 | −0.0098558 | 0.00985584 |
| 3050 | 8 | 6747866 | 6748119 | −0.0098558 | 0.00985583 |
| 3051 | 17 | 33815220 | 33815317 | 0.00984378 | 0.009843775 |
| 3052 | 16 | 4898174 | 4898311 | 0.00983513 | 0.009835135 |
| 3053 | 17 | 35293850 | 35293998 | −0.0098324 | 0.00983238 |
| 3054 | 21 | 41015412 | 41015576 | −0.0098087 | 0.00980868 |
| 3055 | 5 | 100236124 | 100236259 | 0.00976293 | 0.00976293 |
| 3056 | 1 | 181059082 | 181059228 | 0.00973908 | 0.009739083 |
| 3057 | 22 | 45329677 | 45330083 | 0.00964851 | 0.009648514 |
| 3058 | 16 | 14396080 | 14396205 | 0.00963598 | 0.009635984 |
| 3059 | 1 | 151254749 | 151254884 | 0.00963045 | 0.009630452 |
| 3060 | 15 | 71056058 | 71056210 | −0.0096226 | 0.00962257 |
| 3061 | 7 | 143105892 | 143106044 | −0.0095929 | 0.00959291 |
| 3062 | 4 | 17615925 | 17616073 | 0.00956176 | 0.009561762 |
| 3063 | 20 | 44935962 | 44936103 | −0.0095519 | 0.00955192 |
| 3064 | 11 | 3601986 | 3602087 | 0.00943717 | 0.009437168 |
| 3065 | 7 | 128045607 | 128045748 | 0.00943592 | 0.009435921 |
| 3066 | 11 | 18548130 | 18548274 | −0.0094256 | 0.00942561 |
| 3067 | 1 | 193029049 | 193029185 | 0.00942272 | 0.009422717 |
| 3068 | 1 | 224805683 | 224805839 | 0.00940001 | 0.009400006 |
| 3069 | 1 | 12239338 | 12239516 | 0.00938581 | 0.009385812 |
| 3070 | 16 | 5007763 | 5008041 | 0.00926483 | 0.00926483 |
| 3071 | 1 | 181998873 | 181999000 | −0.009263 | 0.00926302 |
| 3072 | 20 | 30327363 | 30327495 | −0.0092185 | 0.00921846 |
| 3073 | 7 | 93519933 | 93520243 | 0.00920678 | 0.009206781 |
| 3074 | 1 | 36863229 | 36863491 | 0.00919144 | 0.009191442 |
| 3075 | 2 | 171627643 | 171627860 | −0.0091598 | 0.00915981 |
| 3076 | 19 | 41903157 | 41903411 | −0.0090905 | 0.00909053 |
| 3077 | 7 | 99070303 | 99070657 | 0.00905333 | 0.009053335 |
| 3078 | 2 | 182542788 | 182542935 | 0.00904043 | 0.009040429 |
| 3079 | 6 | 107780720 | 107781079 | 0.00900461 | 0.009004605 |
| 3080 | 11 | 44972623 | 44972765 | 0.00894094 | 0.008940942 |
| 3081 | 20 | 55383355 | 55383481 | 0.00892165 | 0.008921649 |
| 3082 | 5 | 159739751 | 159739896 | 0.00891022 | 0.008910224 |
| 3083 | 1 | 111682513 | 111682734 | 0.0088889 | 0.008888895 |
| 3084 | 17 | 49231114 | 49231309 | 0.0088439 | 0.008843899 |
| 3085 | 11 | 7041579 | 7041761 | −0.0087993 | 0.00879925 |
| 3086 | 16 | 17510689 | 17510833 | −0.0087888 | 0.0087888 |
| 3087 | 10 | 31875809 | 31876008 | −0.0087558 | 0.0087558 |
| 3088 | 4 | 3957594 | 3957707 | −0.008752 | 0.00875196 |
| 3089 | 14 | 24665122 | 24665266 | 0.00872698 | 0.008726976 |
| 3090 | 12 | 54402651 | 54402788 | 0.00870884 | 0.008708837 |
| 3091 | 19 | 36236462 | 36236695 | −0.0086818 | 0.0086818 |
| 3092 | 4 | 57845323 | 57845467 | −0.0086786 | 0.00867861 |
| 3093 | 1 | 40840495 | 40840704 | −0.0086716 | 0.00867156 |
| 3094 | 11 | 93517231 | 93517481 | −0.0086672 | 0.00866718 |
| 3095 | 13 | 21635658 | 21635909 | 0.00866191 | 0.008661906 |
| 3096 | 10 | 129809748 | 129809885 | −0.0086533 | 0.00865326 |
| 3097 | X | 152089945 | 152090193 | 0.00860563 | 0.008605631 |
| 3098 | 19 | 39936540 | 39936733 | 0.00859009 | 0.008590088 |
| 3099 | 8 | 145652824 | 145653141 | 0.00857125 | 0.008571249 |
| 3100 | 9 | 77567284 | 77567565 | 0.00857044 | 0.008570441 |
| 3101 | 1 | 205425388 | 205425548 | −0.0085429 | 0.00854286 |
| 3102 | 12 | 133485611 | 133485754 | −0.0085248 | 0.00852479 |
| 3103 | 11 | 116063750 | 116063900 | 0.00851501 | 0.008515015 |
| 3104 | 1 | 85930396 | 85930545 | −0.0085076 | 0.00850758 |
| 3105 | X | 153541751 | 153541909 | −0.0084854 | 0.00848543 |
| 3106 | 6 | 30538765 | 30538908 | 0.00848202 | 0.008482024 |
| 3107 | 10 | 134600768 | 134600945 | −0.008437 | 0.00843698 |
| 3108 | 1 | 148555980 | 148556132 | 0.00838962 | 0.008389616 |
| 3109 | 6 | 144471355 | 144471634 | 0.00837979 | 0.008379794 |
| 3110 | 7 | 107220267 | 107220454 | −0.008363 | 0.00836301 |
| 3111 | 4 | 103997807 | 103997952 | 0.00835597 | 0.008355972 |
| 3112 | 17 | 19266364 | 19266501 | −0.008346 | 0.00834597 |
| 3113 | 11 | 63381754 | 63381892 | 0.00833587 | 0.008335867 |
| 3114 | 6 | 3068484 | 3068653 | 0.00828945 | 0.008289455 |
| 3115 | 1 | 201798532 | 201798690 | −0.0082798 | 0.00827981 |
| 3116 | 15 | 79382471 | 79382609 | −0.008225 | 0.00822502 |
| 3117 | 19 | 36138953 | 36139099 | −0.0082248 | 0.00822485 |
| 3118 | 1 | 207226526 | 207226911 | 0.00820058 | 0.008200584 |
| 3119 | 17 | 65471572 | 65471881 | −0.0081985 | 0.00819852 |
| 3120 | 12 | 122227158 | 122227564 | 0.00813169 | 0.008131694 |
| 3121 | X | 136650527 | 136650730 | 0.00812873 | 0.008128729 |
| 3122 | 9 | 111695652 | 111695803 | −0.0081232 | 0.00812325 |
| 3123 | 10 | 130339139 | 130339387 | 0.00812056 | 0.008120557 |
| 3124 | 5 | 170739071 | 170739944 | −0.0080906 | 0.00809064 |
| 3125 | 6 | 167276545 | 167276689 | −0.0080672 | 0.00806722 |
| 3126 | 17 | 57184109 | 57184545 | 0.00804472 | 0.008044722 |
| 3127 | 6 | 33385971 | 33386235 | −0.0079625 | 0.0079625 |
| 3128 | 3 | 45731140 | 45731322 | −0.00794 | 0.00793996 |
| 3129 | 2 | 190539332 | 190539571 | 0.00793427 | 0.007934268 |
| 3130 | 15 | 69687017 | 69687166 | −0.0079105 | 0.00791048 |
| 3131 | 12 | 45610615 | 45610789 | 0.00786273 | 0.007862732 |
| 3132 | 5 | 142150728 | 142150867 | −0.0078549 | 0.00785489 |
| 3133 | 19 | 17914074 | 17914449 | −0.0078516 | 0.00785157 |
| 3134 | 17 | 4407523 | 4407662 | −0.0078068 | 0.00780678 |
| 3135 | 7 | 71800643 | 71802299 | −0.0078005 | 0.0078005 |
| 3136 | 6 | 32939227 | 32939503 | 0.00776215 | 0.007762152 |
| 3137 | 17 | 25680546 | 25680691 | 0.00770509 | 0.007705094 |
| 3138 | 10 | 44847942 | 44848080 | −0.0076842 | 0.00768421 |
| 3139 | 3 | 184429322 | 184429464 | −0.0076804 | 0.00768038 |
| 3140 | 12 | 8233985 | 8234156 | −0.0076168 | 0.00761684 |
| 3141 | 3 | 52090054 | 52090230 | 0.00757208 | 0.007572083 |
| 3142 | 4 | 13546403 | 13546563 | −0.0075414 | 0.00754139 |
| 3143 | 6 | 27759309 | 27759463 | 0.00748737 | 0.007487375 |
| 3144 | 7 | 86849388 | 86849569 | −0.0074669 | 0.00746693 |
| 3145 | 16 | 2581758 | 2581900 | −0.007465 | 0.00746499 |
| 3146 | 3 | 58885157 | 58885461 | 0.0074165 | 0.007416503 |
| 3147 | 7 | 97736290 | 97736430 | 0.00740103 | 0.007401033 |
| 3148 | 16 | 54446071 | 54446283 | 0.00738191 | 0.007381908 |
| 3149 | 19 | 16677146 | 16677384 | −0.0073576 | 0.00735758 |
| 3150 | 6 | 33290364 | 33290503 | −0.0073393 | 0.00733926 |
| 3151 | 7 | 96746965 | 96747148 | 0.00729951 | 0.007299511 |
| 3152 | 11 | 18415774 | 18416050 | −0.007299 | 0.00729898 |
| 3153 | 6 | 20319993 | 20320512 | −0.0072891 | 0.00728911 |
| 3154 | 2 | 54785483 | 54785615 | 0.00724907 | 0.007249071 |
| 3155 | 1 | 156737381 | 156737522 | 0.00724586 | 0.007245857 |
| 3156 | 6 | 74098733 | 74098878 | 0.00724289 | 0.007242894 |
| 3157 | 2 | 218899542 | 218899663 | 0.00723382 | 0.007233821 |
| 3158 | 2 | 101768180 | 101768327 | −0.0072161 | 0.00721614 |
| 3159 | 21 | 43509532 | 43509673 | 0.00721019 | 0.007210187 |
| 3160 | 2 | 97304115 | 97304267 | 0.00720385 | 0.007203847 |
| 3161 | 7 | 2548140 | 2548292 | −0.0071957 | 0.00719565 |
| 3162 | 16 | 54318240 | 54318393 | −0.0071759 | 0.00717594 |
| 3163 | 1 | 201084040 | 201084185 | 0.00717442 | 0.007174416 |
| 3164 | 6 | 31830448 | 31830695 | −0.007155 | 0.00715496 |
| 3165 | 22 | 24407684 | 24407936 | 0.00710623 | 0.007106234 |
| 3166 | 11 | 123447772 | 123447911 | 0.00710084 | 0.007100844 |
| 3167 | 11 | 118799410 | 118799555 | −0.0070979 | 0.00709791 |
| 3168 | 1 | 43919784 | 43919930 | −0.0070938 | 0.0070938 |
| 3169 | 10 | 21785918 | 21786056 | −0.0070604 | 0.00706044 |
| 3170 | 12 | 52512468 | 52512608 | 0.00705214 | 0.007052137 |
| 3171 | 22 | 17717976 | 17718102 | −0.0069409 | 0.00694092 |
| 3172 | 19 | 984685 | 984820 | −0.0069253 | 0.00692528 |
| 3173 | 2 | 239229289 | 239229470 | 0.00692184 | 0.00692184 |
| 3174 | 2 | 217363386 | 217363535 | 0.00691113 | 0.006911128 |
| 3175 | 22 | 38214901 | 38215045 | 0.00690917 | 0.006909171 |
| 3176 | 11 | 11643683 | 11643884 | −0.0069022 | 0.00690217 |
| 3177 | 10 | 63663060 | 63663341 | 0.00687095 | 0.006870949 |
| 3178 | 1 | 26147221 | 26147430 | 0.00684624 | 0.006846239 |
| 3179 | 15 | 43477532 | 43477704 | −0.0068166 | 0.00681661 |
| 3180 | 7 | 19151938 | 19152453 | −0.0068093 | 0.00680926 |
| 3181 | 3 | 160939367 | 160939511 | −0.0068051 | 0.00680509 |
| 3182 | 6 | 10695040 | 10695138 | 0.0068011 | 0.006801099 |
| 3183 | 6 | 117583090 | 117583226 | −0.0068002 | 0.0068002 |
| 3184 | 4 | 108745967 | 108746124 | 0.00678576 | 0.006785756 |
| 3185 | 2 | 161350438 | 161350586 | 0.00676615 | 0.00676615 |
| 3186 | 7 | 127228146 | 127228294 | 0.00675578 | 0.006755782 |
| 3187 | 14 | 107154896 | 107155210 | −0.0067419 | 0.00674189 |
| 3188 | 17 | 4851353 | 4851491 | −0.0067028 | 0.0067028 |
| 3189 | X | 1601318 | 1601453 | 0.00665436 | 0.006654364 |
| 3190 | 14 | 52313965 | 52314420 | −0.0066503 | 0.00665028 |
| 3191 | 10 | 87354117 | 87354278 | 0.00664844 | 0.006648443 |
| 3192 | 17 | 40021817 | 40021929 | −0.0066054 | 0.00660544 |
| 3193 | 9 | 130213721 | 130213865 | −0.0065852 | 0.00658515 |
| 3194 | 5 | 174145117 | 174145360 | 0.00655338 | 0.006553376 |
| 3195 | 3 | 45151751 | 45151935 | 0.00653009 | 0.006530088 |
| 3196 | 21 | 38078962 | 38079238 | −0.0065214 | 0.00652137 |
| 3197 | 4 | 166673074 | 166673215 | −0.0065188 | 0.00651884 |
| 3198 | 19 | 8008504 | 8008751 | −0.0064014 | 0.00640143 |
| 3199 | 1 | 203830796 | 203830975 | −0.0063877 | 0.00638766 |
| 3200 | 6 | 17987155 | 17987299 | 0.0063662 | 0.006366203 |
| 3201 | 6 | 130702981 | 130703140 | −0.0062888 | 0.00628884 |
| 3202 | 20 | 49574858 | 49575009 | 0.00625866 | 0.006258657 |
| 3203 | 20 | 36322312 | 36322568 | 0.00623669 | 0.006236694 |
| 3204 | 19 | 11072078 | 11072214 | −0.0062073 | 0.00620727 |
| 3205 | 19 | 55866255 | 55866445 | −0.0061822 | 0.00618221 |
| 3206 | 2 | 154335268 | 154335452 | −0.006169 | 0.00616898 |
| 3207 | 16 | 1822956 | 1823105 | 0.00616607 | 0.006166069 |
| 3208 | 22 | 19419859 | 19420246 | −0.0061486 | 0.0061486 |
| 3209 | 1 | 24070332 | 24070475 | −0.0061458 | 0.00614583 |
| 3210 | 1 | 90287375 | 90287538 | −0.0061357 | 0.00613566 |
| 3211 | 14 | 93673106 | 93673373 | 0.00612959 | 0.006129586 |
| 3212 | 11 | 110582958 | 110583105 | 0.00609609 | 0.006096087 |
| 3213 | 1 | 31867530 | 31867773 | 0.00606399 | 0.006063987 |
| 3214 | 3 | 39093319 | 39093571 | 0.00605248 | 0.006052479 |
| 3215 | 16 | 11716374 | 11716509 | 0.00603364 | 0.006033643 |
| 3216 | 3 | 187461391 | 187461525 | 0.00594722 | 0.005947225 |
| 3217 | 4 | 44728564 | 44728805 | 0.00592606 | 0.005926065 |
| 3218 | 7 | 19748210 | 19748550 | −0.0058917 | 0.00589166 |
| 3219 | 6 | 31548766 | 31548944 | 0.00583597 | 0.005835969 |
| 3220 | 16 | 25118158 | 25118292 | 0.00582008 | 0.005820076 |
| 3221 | 12 | 56660550 | 56660658 | −0.0058111 | 0.00581105 |
| 3222 | 22 | 41698773 | 41698937 | 0.0057995 | 0.005799501 |
| 3223 | 9 | 132652895 | 132653168 | −0.0057862 | 0.00578618 |
| 3224 | 1 | 47904385 | 47904531 | −0.0057726 | 0.00577259 |
| 3225 | 19 | 38270374 | 38270521 | 0.00575756 | 0.005757557 |
| 3226 | 2 | 96987847 | 96987982 | −0.0057497 | 0.00574971 |
| 3227 | 11 | 129244365 | 129244511 | 0.00574188 | 0.005741875 |
| 3228 | 1 | 1840405 | 1840522 | −0.0057216 | 0.00572156 |
| 3229 | 5 | 175793413 | 175793561 | 0.00571679 | 0.00571679 |
| 3230 | 17 | 29638710 | 29638955 | −0.0057081 | 0.00570806 |
| 3231 | 15 | 77925883 | 77926025 | −0.0056747 | 0.00567472 |
| 3232 | 15 | 70550847 | 70551302 | −0.0056732 | 0.00567323 |
| 3233 | 16 | 68344514 | 68344689 | 0.00563379 | 0.005633787 |
| 3234 | 19 | 8407968 | 8408395 | 0.00558497 | 0.005584967 |
| 3235 | 8 | 103250682 | 103250838 | −0.0055817 | 0.00558166 |
| 3236 | 21 | 34696604 | 34696778 | −0.0055575 | 0.00555749 |
| 3237 | 20 | 46634883 | 46635087 | −0.0055419 | 0.0055419 |
| 3238 | 19 | 2427327 | 2427474 | −0.0054856 | 0.00548561 |
| 3239 | 11 | 71639182 | 71639322 | −0.0054726 | 0.0054726 |
| 3240 | 19 | 3557779 | 3557937 | −0.0054331 | 0.00543311 |
| 3241 | 16 | 31053417 | 31053574 | 0.00543013 | 0.00543013 |
| 3242 | 3 | 13462675 | 13462815 | 0.00542732 | 0.005427323 |
| 3243 | 8 | 61193638 | 61193781 | 0.00535445 | 0.005354452 |
| 3244 | 19 | 46389464 | 46389658 | −0.0053412 | 0.00534115 |
| 3245 | 11 | 125495506 | 125495645 | −0.0053346 | 0.00533465 |
| 3246 | 2 | 21022507 | 21022644 | 0.00531497 | 0.005314966 |
| 3247 | 1 | 153643399 | 153643718 | −0.0052802 | 0.00528017 |
| 3248 | 12 | 120315051 | 120315203 | 0.00522433 | 0.005224329 |
| 3249 | 11 | 124746229 | 124746405 | −0.0052135 | 0.00521351 |
| 3250 | 2 | 85635717 | 85635991 | −0.0052081 | 0.00520811 |
| 3251 | 1 | 213123595 | 213123756 | −0.0052001 | 0.00520008 |
| 3252 | 1 | 12678130 | 12678274 | 0.00519273 | 0.005192726 |
| 3253 | 6 | 788168 | 788321 | 0.00515805 | 0.00515805 |
| 3254 | 16 | 3096404 | 3096545 | −0.0051185 | 0.00511852 |
| 3255 | 22 | 40859137 | 40859546 | 0.00510543 | 0.005105427 |
| 3256 | 16 | 79634608 | 79634819 | 0.00505295 | 0.005052953 |
| 3257 | 5 | 52856384 | 52856624 | −0.005017 | 0.00501696 |
| 3258 | 8 | 86019278 | 86019493 | 0.00500699 | 0.005006994 |
| 3259 | 5 | 137368238 | 137368383 | 0.00498498 | 0.004984982 |
| 3260 | 6 | 116421781 | 116422200 | 0.00497368 | 0.004973679 |
| 3261 | 16 | 20753187 | 20753356 | −0.0049462 | 0.00494621 |
| 3262 | 5 | 112629495 | 112629681 | −0.0049178 | 0.00491784 |
| 3263 | 22 | 30752443 | 30752702 | 0.0049163 | 0.004916304 |
| 3264 | 22 | 31090153 | 31090302 | −0.004885 | 0.00488499 |
| 3265 | 11 | 33757492 | 33757638 | 0.00488273 | 0.004882733 |
| 3266 | 4 | 109541451 | 109541724 | 0.00485415 | 0.004854148 |
| 3267 | 2 | 54198258 | 54198446 | 0.00484471 | 0.004844715 |
| 3268 | 1 | 31313670 | 31314114 | −0.004842 | 0.00484204 |
| 3269 | 8 | 117886944 | 117887103 | 0.00479395 | 0.004793953 |
| 3270 | 19 | 55593461 | 55593994 | −0.0047566 | 0.00475661 |
| 3271 | 14 | 23564269 | 23564406 | −0.0047447 | 0.00474469 |
| 3272 | 15 | 43622912 | 43623051 | −0.0047339 | 0.0047339 |
| 3273 | 11 | 128775467 | 128775574 | 0.00472938 | 0.004729384 |
| 3274 | 1 | 44496934 | 44497092 | −0.0047293 | 0.0047293 |
| 3275 | 2 | 10263314 | 10263448 | 0.0047146 | 0.004714599 |
| 3276 | 2 | 162016964 | 162017117 | 0.00468741 | 0.004687414 |
| 3277 | 11 | 65660800 | 65661012 | 0.00464616 | 0.004646158 |
| 3278 | 5 | 179223375 | 179223537 | 0.00462379 | 0.004623787 |
| 3279 | 3 | 15140710 | 15140879 | 0.00459803 | 0.004598029 |
| 3280 | 6 | 151713100 | 151713262 | −0.0045687 | 0.00456874 |
| 3281 | 20 | 1472141 | 1472285 | 0.00455365 | 0.004553654 |
| 3282 | 3 | 52740074 | 52740227 | 0.00453392 | 0.004533924 |
| 3283 | 18 | 47792840 | 47793011 | 0.00451226 | 0.004512258 |
| 3284 | 11 | 61583493 | 61583638 | −0.0044422 | 0.00444217 |
| 3285 | 15 | 69591491 | 69591638 | 0.00439706 | 0.004397059 |
| 3286 | 6 | 126307492 | 126307666 | −0.0043644 | 0.0043644 |
| 3287 | 11 | 67085104 | 67085410 | 0.0043609 | 0.004360897 |
| 3288 | 12 | 51984425 | 51984587 | 0.00435055 | 0.004350547 |
| 3289 | 2 | 219271983 | 219272170 | −0.0043021 | 0.00430206 |
| 3290 | 19 | 14583203 | 14583342 | 0.00428583 | 0.004285831 |
| 3291 | 19 | 12848199 | 12848415 | −0.0042704 | 0.00427037 |
| 3292 | 2 | 136743344 | 136743525 | 0.00424304 | 0.00424304 |
| 3293 | 1 | 228594894 | 228595031 | 0.0042259 | 0.004225904 |
| 3294 | 19 | 13227563 | 13227779 | −0.0042087 | 0.00420865 |
| 3295 | 1 | 111506432 | 111506785 | 0.00417175 | 0.004171747 |
| 3296 | 16 | 66982042 | 66982743 | −0.0041233 | 0.00412333 |
| 3297 | 1 | 118471859 | 118472009 | 0.00411733 | 0.004117333 |
| 3298 | 4 | 158141857 | 158142021 | 0.00410577 | 0.004105772 |
| 3299 | 17 | 28443565 | 28443718 | −0.0041007 | 0.00410067 |
| 3300 | 4 | 37684570 | 37684744 | −0.0040898 | 0.0040898 |
| 3301 | 7 | 100472675 | 100472841 | −0.0040471 | 0.00404708 |
| 3302 | 17 | 61523997 | 61524133 | 0.0040381 | 0.004038096 |
| 3303 | 6 | 36410676 | 36410847 | 0.00398575 | 0.003985747 |
| 3304 | 10 | 50970348 | 50970520 | 0.00397032 | 0.003970317 |
| 3305 | 3 | 125029701 | 125029845 | −0.0039556 | 0.00395555 |
| 3306 | 1 | 25291797 | 25291928 | 0.00395365 | 0.003953651 |
| 3307 | 6 | 26159047 | 26159215 | 0.00395262 | 0.003952616 |
| 3308 | 5 | 92917047 | 92917193 | 0.00394001 | 0.00394001 |
| 3309 | 4 | 331542 | 331697 | −0.0039283 | 0.00392831 |
| 3310 | 17 | 38519060 | 38519210 | 0.00389199 | 0.003891991 |
| 3311 | 15 | 64752711 | 64752829 | −0.0038728 | 0.00387278 |
| 3312 | X | 40125932 | 40126229 | 0.00386512 | 0.003865123 |
| 3313 | 2 | 179343179 | 179343330 | −0.0038521 | 0.00385213 |
| 3314 | 20 | 1878731 | 1878872 | 0.00384051 | 0.003840513 |
| 3315 | 14 | 20811487 | 20811713 | −0.0038046 | 0.00380456 |
| 3316 | 3 | 31268945 | 31269077 | −0.0037772 | 0.00377723 |
| 3317 | 17 | 76380197 | 76380463 | 0.00376392 | 0.003763915 |
| 3318 | 15 | 76196083 | 76196220 | −0.0037461 | 0.00374607 |
| 3319 | 19 | 12175425 | 12175572 | −0.0037116 | 0.00371155 |
| 3320 | 17 | 7138008 | 7138147 | −0.003665 | 0.00366496 |
| 3321 | 12 | 121838076 | 121838221 | 0.00366459 | 0.003664593 |
| 3322 | 12 | 50505442 | 50505589 | −0.0036626 | 0.00366255 |
| 3323 | 7 | 102004219 | 102004375 | −0.0036602 | 0.00366023 |
| 3324 | 3 | 4892148 | 4892293 | −0.00366 | 0.00365997 |
| 3325 | 17 | 75663124 | 75663403 | −0.0036581 | 0.00365811 |
| 3326 | 2 | 197790872 | 197791013 | 0.00364995 | 0.003649948 |
| 3327 | 19 | 2785593 | 2785754 | −0.0035348 | 0.00353479 |
| 3328 | 22 | 27053127 | 27053295 | −0.0035136 | 0.00351356 |
| 3329 | 14 | 50998842 | 50998985 | 0.00350956 | 0.003509564 |
| 3330 | 7 | 41982716 | 41982855 | −0.0035031 | 0.0035031 |
| 3331 | 19 | 37019094 | 37019374 | −0.0034772 | 0.00347721 |
| 3332 | 11 | 75921732 | 75921888 | 0.00342307 | 0.003423071 |
| 3333 | 4 | 3294320 | 3294468 | −0.0034139 | 0.00341392 |
| 3334 | 14 | 62583882 | 62584091 | −0.0033714 | 0.00337144 |
| 3335 | 4 | 140477425 | 140477573 | −0.0033644 | 0.00336436 |
| 3336 | 10 | 30990361 | 30990643 | −0.0033542 | 0.00335421 |
| 3337 | 7 | 29310671 | 29310813 | −0.0032191 | 0.00321906 |
| 3338 | 2 | 28113226 | 28113518 | 0.00319065 | 0.003190647 |
| 3339 | 7 | 766110 | 766464 | −0.00319 | 0.00319001 |
| 3340 | 1 | 94549302 | 94549470 | −0.0031847 | 0.00318467 |
| 3341 | 13 | 110958898 | 110959048 | −0.0031233 | 0.00312334 |
| 3342 | X | 597928 | 598097 | −0.0030769 | 0.00307689 |
| 3343 | 2 | 114457811 | 114457979 | 0.00305707 | 0.003057073 |
| 3344 | 10 | 106399442 | 106399585 | −0.0030435 | 0.00304345 |
| 3345 | 9 | 133588018 | 133588161 | −0.0030068 | 0.00300678 |
| 3346 | 14 | 59105304 | 59105464 | 0.00297012 | 0.002970124 |
| 3347 | 5 | 33936386 | 33936532 | −0.0029273 | 0.00292734 |
| 3348 | 3 | 66024477 | 66024627 | −0.0029143 | 0.00291427 |
| 3349 | 18 | 6633469 | 6633606 | 0.00285992 | 0.002859922 |
| 3350 | 3 | 154145791 | 154145930 | 0.00280712 | 0.002807116 |
| 3351 | 7 | 100813219 | 100813380 | 0.00279832 | 0.002798319 |
| 3352 | 3 | 180397223 | 180397399 | −0.0027621 | 0.00276206 |
| 3353 | 19 | 53445720 | 53445865 | 0.00271149 | 0.002711489 |
| 3354 | 14 | 23298827 | 23299091 | −0.0027114 | 0.00271137 |
| 3355 | 15 | 91475625 | 91475961 | 0.00270006 | 0.002700065 |
| 3356 | 7 | 27252689 | 27253042 | −0.0026992 | 0.00269925 |
| 3357 | 3 | 183736005 | 183736158 | 0.00269571 | 0.002695709 |
| 3358 | 8 | 22435965 | 22436238 | 0.0026882 | 0.002688202 |
| 3359 | 1 | 182583990 | 182584125 | 0.00266975 | 0.002669755 |
| 3360 | 22 | 32026795 | 32027020 | 0.00266465 | 0.002664646 |
| 3361 | 8 | 123793254 | 123793392 | 0.00260173 | 0.002601726 |
| 3362 | 10 | 90031287 | 90031454 | 0.00259806 | 0.002598063 |
| 3363 | 3 | 48481558 | 48481842 | −0.0025932 | 0.0025932 |
| 3364 | 2 | 95825566 | 95825774 | −0.0025687 | 0.00256873 |
| 3365 | 17 | 48074032 | 48074175 | −0.0025601 | 0.0025601 |
| 3366 | 19 | 6737615 | 6737829 | 0.00255512 | 0.002555121 |
| 3367 | 19 | 44488044 | 44488186 | −0.0024884 | 0.00248837 |
| 3368 | 9 | 134273561 | 134273948 | −0.0024832 | 0.00248322 |
| 3369 | 17 | 61909048 | 61909206 | −0.0024788 | 0.00247877 |
| 3370 | 10 | 50817732 | 50817898 | −0.0024703 | 0.00247033 |
| 3371 | 1 | 32237512 | 32238693 | −0.0024548 | 0.00245477 |
| 3372 | 12 | 66460076 | 66460219 | −0.0023959 | 0.00239588 |
| 3373 | 17 | 80477057 | 80477204 | 0.00237591 | 0.002375907 |
| 3374 | 12 | 94853421 | 94853765 | 0.00234918 | 0.00234918 |
| 3375 | 15 | 64386169 | 64386316 | 0.00229006 | 0.002290064 |
| 3376 | 1 | 20960125 | 20960275 | 0.00228148 | 0.002281484 |
| 3377 | 16 | 14091839 | 14091995 | −0.0022617 | 0.00226165 |
| 3378 | 2 | 39444073 | 39444253 | −0.0022606 | 0.00226062 |
| 3379 | 15 | 89951760 | 89953021 | −0.0022429 | 0.00224289 |
| 3380 | 1 | 156470822 | 156471084 | 0.00224126 | 0.002241256 |
| 3381 | 12 | 3601228 | 3601368 | 0.00222559 | 0.002225595 |
| 3382 | 1 | 10753755 | 10753913 | 0.00222216 | 0.002222157 |
| 3383 | 6 | 29596135 | 29596251 | 0.00221456 | 0.002214556 |
| 3384 | 3 | 37847781 | 37847994 | −0.0021838 | 0.00218379 |
| 3385 | 1 | 249132699 | 249132835 | −0.0021801 | 0.00218008 |
| 3386 | 17 | 55676747 | 55676892 | 0.00214769 | 0.002147692 |
| 3387 | 2 | 172290498 | 172290644 | −0.0021433 | 0.00214335 |
| 3388 | 19 | 54704552 | 54705040 | 0.00210774 | 0.00210774 |
| 3389 | 1 | 47800090 | 47800232 | 0.00209696 | 0.002096963 |
| 3390 | 11 | 117667050 | 117668144 | −0.0020969 | 0.00209689 |
| 3391 | 14 | 69620354 | 69620528 | 0.00208329 | 0.002083291 |
| 3392 | 15 | 99193850 | 99194102 | 0.00200741 | 0.002007411 |
| 3393 | 15 | 55488732 | 55488883 | −0.0019695 | 0.0019695 |
| 3394 | 6 | 7540994 | 7541132 | 0.00194547 | 0.001945466 |
| 3395 | 11 | 73019402 | 73019753 | −0.001937 | 0.001937 |
| 3396 | 2 | 46770239 | 46770414 | 0.00190381 | 0.001903808 |
| 3397 | 7 | 76178467 | 76178708 | −0.001854 | 0.00185403 |
| 3398 | 2 | 176979545 | 176979828 | −0.0018499 | 0.00184992 |
| 3399 | 1 | 23946192 | 23946349 | 0.00181374 | 0.001813741 |
| 3400 | 5 | 108063964 | 108064104 | −0.0017972 | 0.00179719 |
| 3401 | 19 | 58125482 | 58125656 | −0.0017427 | 0.00174275 |
| 3402 | 2 | 55459548 | 55459862 | 0.00172761 | 0.001727614 |
| 3403 | 9 | 127020042 | 127020160 | −0.0017236 | 0.00172356 |
| 3404 | 7 | 103086725 | 103086911 | 0.00168309 | 0.001683087 |
| 3405 | 3 | 42003644 | 42003789 | 0.00165691 | 0.00165691 |
| 3406 | 7 | 130034410 | 130034546 | 0.00162819 | 0.001628185 |
| 3407 | 13 | 46755257 | 46755410 | 0.00160338 | 0.001603383 |
| 3408 | 3 | 130612603 | 130612887 | 0.00158485 | 0.001584849 |
| 3409 | 6 | 137808750 | 137810520 | −0.0015725 | 0.00157247 |
| 3410 | 9 | 111696332 | 111696465 | 0.00156795 | 0.001567954 |
| 3411 | 16 | 2042025 | 2042177 | 0.00154739 | 0.001547391 |
| 3412 | 14 | 24701316 | 24701454 | 0.00154083 | 0.001540831 |
| 3413 | 2 | 11270112 | 11270272 | −0.0015396 | 0.00153963 |
| 3414 | 10 | 14995966 | 14996111 | −0.0015319 | 0.00153193 |
| 3415 | 19 | 46498311 | 46498395 | −0.0014906 | 0.0014906 |
| 3416 | 7 | 100183465 | 100183679 | −0.0014506 | 0.00145056 |
| 3417 | 3 | 12883296 | 12883538 | −0.0014299 | 0.00142994 |
| 3418 | 10 | 106113095 | 106113251 | 0.00140995 | 0.001409947 |
| 3419 | 17 | 17206937 | 17207086 | 0.00140115 | 0.001401146 |
| 3420 | 7 | 4848688 | 4849273 | −0.0013971 | 0.00139712 |
| 3421 | 10 | 126606480 | 126606608 | −0.0013501 | 0.00135012 |
| 3422 | 1 | 180203466 | 180203653 | −0.0013392 | 0.00133916 |
| 3423 | 12 | 106642580 | 106642735 | −0.0013197 | 0.00131971 |
| 3424 | 11 | 47290807 | 47290968 | −0.0013148 | 0.00131478 |
| 3425 | 17 | 1419284 | 1419428 | −0.0012976 | 0.00129761 |
| 3426 | 2 | 71192075 | 71192529 | −0.001222 | 0.00122197 |
| 3427 | 10 | 100206744 | 100206893 | 0.00118169 | 0.001181687 |
| 3428 | 6 | 4021278 | 4021464 | −0.0011747 | 0.00117469 |
| 3429 | 20 | 34680604 | 34680735 | −0.0011704 | 0.00117042 |
| 3430 | 5 | 174905539 | 174905675 | −0.0011612 | 0.00116116 |
| 3431 | 3 | 156272831 | 156273156 | −0.0011498 | 0.00114985 |
| 3432 | 1 | 59407642 | 59407786 | −0.0011185 | 0.00111851 |
| 3433 | 3 | 140985907 | 140986230 | 0.00110662 | 0.001106618 |
| 3434 | 5 | 128110288 | 128110533 | −0.0009822 | 0.000982246 |
| 3435 | 10 | 112257867 | 112258017 | −0.0008832 | 0.0008832 |
| 3436 | 19 | 1489577 | 1489744 | −0.0008814 | 0.000881385 |
| 3437 | 22 | 45060064 | 45060406 | −0.0007911 | 0.000791072 |
| 3438 | 19 | 57831561 | 57831919 | 0.00070428 | 0.000704283 |
| 3439 | 5 | 151138297 | 151138486 | 0.00069822 | 0.000698222 |
| 3440 | 17 | 27333028 | 27333267 | −0.0006879 | 0.000687893 |
| 3441 | 3 | 184337322 | 184337467 | −0.0006866 | 0.000686622 |
| 3442 | 16 | 4675576 | 4675730 | −0.0006787 | 0.000678726 |
| 3443 | 13 | 46038764 | 46039071 | −0.000666 | 0.000666042 |
| 3444 | 12 | 124086576 | 124086795 | 0.00063414 | 0.000634143 |
| 3445 | 1 | 97187736 | 97187883 | 0.00062874 | 0.000628736 |
| 3446 | 15 | 68126215 | 68126360 | 0.00062162 | 0.000621617 |
| 3447 | 7 | 24797284 | 24797430 | −0.0005885 | 0.000588515 |
| 3448 | 14 | 90147461 | 90147619 | −0.0005518 | 0.000551812 |
| 3449 | 3 | 37535763 | 37535918 | −0.0005482 | 0.000548194 |
| 3450 | 5 | 180634450 | 180634574 | 0.0005327 | 0.000532701 |
| 3451 | 19 | 58978157 | 58978292 | −0.0004957 | 0.000495723 |
| 3452 | 2 | 232573802 | 232573949 | −0.0004917 | 0.000491702 |
| 3453 | 3 | 124606425 | 124606578 | 0.00048228 | 0.000482282 |
| 3454 | 11 | 1569713 | 1569852 | 0.0004659 | 0.000465904 |
| 3455 | 17 | 79620588 | 79620835 | 0.00044871 | 0.000448711 |
| 3456 | 12 | 56694089 | 56694363 | −0.0004382 | 0.000438202 |
| 3457 | 6 | 100894965 | 100895279 | −0.0004295 | 0.000429507 |
| 3458 | 22 | 48963287 | 48963539 | 0.00042169 | 0.00042169 |
| 3459 | 11 | 120423203 | 120423410 | 0.00038709 | 0.000387088 |
| 3460 | 19 | 1237797 | 1237960 | 0.00031855 | 0.000318546 |
| 3461 | 8 | 118056968 | 118057115 | −0.0003111 | 0.000311103 |
| 3462 | 5 | 139944311 | 139944558 | −0.0002178 | 0.000217826 |
| 3463 | 5 | 32313230 | 32313502 | −0.0002046 | 0.000204559 |
| 3464 | 12 | 112546620 | 112546783 | 0.00020288 | 0.000202876 |
| 3465 | 7 | 135194611 | 135194749 | 0.00019245 | 0.000192448 |
| 3466 | 20 | 33146465 | 33146608 | 0.0001782 | 0.000178199 |
| 3467 | 14 | 100241364 | 100241518 | 0.00013597 | 0.000135974 |
| 3468 | 14 | 60097169 | 60097316 | −0.0001299 | 0.000129908 |
| 3469 | 4 | 186990247 | 186990402 | 0.00010727 | 0.000107274 |
| 3470 | X | 599993 | 600167 | −8.83E−05 | 8.83E−05 |
| 3471 | 17 | 28256788 | 28256937 | 7.80E−05 | 7.80E−05 |
| 3472 | 10 | 126107391 | 126107805 | 3.20E−05 | 3.20E−05 |

### Results

[0192] 2872 genomic regions (N=SID ID NO 601 to SEQ ID 3472) were selected as having non-zero coefficients in the final ridge regression models. This model yielded an average AUC of 0.752. From these 2872 regions, a subset of regions was further randomly selected to assess model performance using a fraction of the selected genomic regions. The predictive value of models built using 1436 (FIG. 5A—mean AUC 0.684), 1149 (FIG. 5B—mean AUC 0.665), 862 (FIG. 5C—mean AUC 0.577), 288 (FIG. 5D—mean AUC 0.531), 29 (FIG. 5E—mean AUC 0.516), 15 (FIG. 5F—mean AUC 0.418) and 12 (FIG. 5G—mean AUC 0.494) randomly selected regions was determined. Models containing 288, 862, 1149 and 1436 were predictive of preeclampsia, as their average AUCs are significantly higher than a random AUC of 0.5 (One Sample t-test P<0.0001 for all comparisons).

[0193] Predictive value of models built using (i) the 1436 regions with the highest absolute coefficient (FIG. 6A—SEQ ID NO 601 to 2036—mean AUC 0.719); (ii) the 1149 regions with the highest absolute coefficient (FIG. 6B—SEQ ID NO 601 to 1749—mean AUC 0.727); (iii) the 862 regions with the highest absolute coefficient (FIG. 6C—SEQ ID NO 601 to 1462—mean AUC 0.718); (iv) the 288 regions with the highest absolute coefficient (FIG. 6D—SEQ ID NO 601 to 888 mean AUC 0.613); (v) the 29 regions with the highest absolute coefficient (FIG. 6E—SEQ ID NO 601 to 629—mean AUC 0.633); (vi) the 15 regions with the highest absolute coefficient (FIG. 6F—SEQ ID NO 601 to 615—mean AUC 0.615); (vii) the 12 regions with the highest absolute coefficient (FIG. 6G—SEQ ID NO 601 to 612 mean AUC 0.5944); (viii) the 11 regions with the highest absolute coefficient (FIG. 6H—SEQ ID NO 601 to 611—mean AUC 0.594); (ix) the 10 regions with the highest absolute coefficient (FIG. 6I—SEQ ID NO 601 to 610—mean AUC 0.523); the 9 regions with the highest absolute coefficient (FIG. 6J—SEQ ID NO 601 to 609—mean AUC 0.481) was determined. Models containing more than the top 10 highest-ranking regions were hence predictive of preeclampsia, as their average AUCs are significantly higher than a random AUC of 0.5 (One Sample t-test P<0.00001 for all comparisons).

[0194] In conclusion, although cfDNA methylation as measured at 2872 genomic regions produced the highest predictive value, with an AUC of 0.752, also smaller subsets of these regions were sufficient to predict preeclampsia, with for example more than 10 top-ranking regions or 288 randomly selected regions out of the 2872 regions identified yielding a significant predictive power to predict preeclampsia around 12 weeks of gestation.

1. A method for the prediction of the risk of developing preeclampsia in a pregnant human subject, wherein said subject's gestational age is under 140 days, comprising the steps of:
a. measuring in a sample from said subject a plurality of loci-specific DNA methylation levels;
b. deriving from said measurement a DNA methylation profile for said subject;
c. comparing said DNA methylation profile to,
i. a reference DNA methylation profile corresponding to a high risk of preeclampsia group; and/or,
ii. a reference DNA methylation profile corresponding to a low risk of preeclampsia group; and,
d. assigning on the basis of said comparison said subject to a preeclampsia risk group, thereby predicting the risk of developing preeclampsia in said subject,
wherein said DNA is cell-free DNA.

2. The method according to claim 1, wherein said measuring step comprises measuring a plurality of loci-specific DNA methylation levels in a set of genomic regions comprising 10 genomic regions wherein each of said 10 genomic regions is distinct and defined in reference to one of SEQ ID NO: 601 to 3472, as found in the human genome build Grch37/hg19.

3. The method according to claim 1 or 2, wherein said measuring step comprises measuring a plurality of loci-specific DNA methylation levels in a set of genomic regions comprising 10 genomic regions wherein each of said 10 genomic regions is distinct and defined in reference to one of SEQ ID NO: 601 to 1768, as found in the human genome build Grch37/hg19, preferably defined in reference to one of SEQ ID NO: 601 to 1026, as found in the human genome build Grch37/hg19, more preferably defined in reference to one of SEQ ID NO: 601 to 652, as found in the human genome build Grch37/hg19.

4. The method according to any one of claims 1 to 3, wherein said measuring step comprises measuring a plurality of loci-specific DNA methylation levels in a set of genomic regions comprising 10 genomic regions wherein each of said 10 genomic regions is distinct and defined in reference to one of SEQ ID NO: 601 to 610, as found in the human genome build Grch37/hg19.

5. The method according to any one of claims 1 to 4, wherein said measuring step comprises measuring a plurality of loci-specific DNA methylation levels in a set of genomic regions comprising 11 genomic regions wherein each of said 11 genomic regions is distinct and defined in reference to one of SEQ ID NO: 601 to 611, as found in the human genome build Grch37/hg19, preferably wherein said measuring step comprises measuring a plurality of loci-specific DNA methylation levels in a set of genomic regions comprising 12 genomic regions wherein each of said 12 genomic regions is distinct and defined in reference to one of SEQ ID NO: 601 to 612, as found in the human genome build Grch37/hg19, more preferably wherein said measuring step comprises measuring a plurality of loci-specific DNA methylation levels in a set of genomic regions comprising 15 genomic regions wherein each of said 15 genomic regions is distinct and defined in reference to one of SEQ ID NO: 601 to 615, as found in the human genome build Grch37/hg19.

6. The method according to any one of claims 1 to 5, wherein said measuring step comprises measuring a plurality of loci-specific DNA methylation levels in a set of genomic regions comprising 29 genomic regions wherein each of said 29 genomic regions is distinct and defined in reference to one of SEQ ID NO: 601 to 629, as found in the human genome build Grch37/hg19.

7. The method according to any one of claims 1 to 6, wherein said sample is a blood sample.

8. The method according to any one of claims 1 to 7, wherein said DNA is circulating-cell-free DNA.

9. The method according to any one of claims 1 to 8, wherein said reference DNA methylation profile corresponding to a high risk of preeclampsia group is derived from the measure of said plurality of loci-specific DNA methylation levels in control subjects, preferably gestational age-matched control subjects, that developed preeclampsia at later stage of pregnancy.

10. The method according to any one of claims 1 to 9, wherein said reference DNA methylation profile corresponding to a low risk of preeclampsia group is derived from the measure of said plurality of loci-specific DNA methylation levels in control subjects, preferably gestational age-matched control subjects, that remained healthy in respect to preeclampsia during their pregnancy.

11. The method according to any one of claims 1 to 10, wherein said subject's gestational age is under 133 days, preferably under 126 days or under 119 days, more preferably under 112 days.

12. The method according to any one of claims 1 to 11, wherein said subject's gestational age is ranging from 28 days to 111 days, preferably is ranging from 63 days to 104 days.

13. The method according to any one of claims 1 to 12, wherein said DNA methylation is methylation of cytosine, preferably methylation of cytosine in a CpG dinucleotide.

14. A kit comprising a set of capture probes specific for at least 10 genomic regions, wherein each of said at least 10 genomic regions are distinct and defined in reference to one of SEQ ID NO: 601 to 3472, as found in the human genome build Grch37/hg19, preferably in reference to one of SEQ ID NO: 601 to 610, as found in the human genome build Grch37/hg19.

15. Use of the kit according to claim 14 for the prediction of the risk of developing preeclampsia in a human subject.

The application's sequence listing, which the Patent Office published only in electronic form, follows.

SEQUENCE LISTING (3472 sequences)

SEQ ID NO: 1 - DNA, 176 bp, Homo sapiens
cggccagagtggcctcagaccgcagcgtcggccgagaggacgccgggatactggccagctccaagtcgaaaggaagcgacgcatgagttgtttggtgcggtgggtagatacctcgagtttctcctcgcccaccgtaggccccgacccctaaaaaggaaacttttgggacgtcagag

SEQ ID NO: 2 - DNA, 240 bp, Homo sapiens
ggtcactgggtaggtggcggctgcgggccaggaacaggcccatgcgcgcagcggcgccagccgcgcctcccaccagcggctctcctgggttaaatcctccaggcctccccgcccccgcgcccggccctaggaatgcgcacgcgcggagggcgcggcccagggcctgctgggagtcgtagttctaacgcgtagtttctcctcacgcctcctgcccccagccccccaccgccgccctttccg

SEQ ID NO: 3 - DNA, 190 bp, Homo sapiens
tctgggagaaaggaggatgcacgtgggctgaggggaagtggggcaggaagcgtgtattaaggcaaagaggtggctcagaaccaggtgcccaccgtgccaggctgtgctggcaccccgtgctcccagggcagagggccagggcaggctgggtgattcacgcctaggttggagctggttgcttctcagactc

SEQ ID NO: 4 - DNA, 154 bp, Homo sapiens
aggcttgcaaaacagacagcgatgtcttgcatttcttctcccgctccagtttttattgctgcggagggcacgacgtgagctgcccgccatccccgccctctcttgacaacagctcagtgaggtaaaaagcatgatggtcacgtagcgagctgcc

SEQ ID NO: 5 - DNA, 143 bp, Homo sapiens
gcgctgccctaggagccaggagcggcagatactgcctccccttcaaggccctcaacggcggaaagagcaatcgctgcatactgatgacagggaacagccacctcttccacaacccagggctctgtggtctccctcctccgcca

SEQ ID NO: 6 - DNA, 139 bp, Homo sapiens
tgcatttgcccttgggggataggtggtgcaaattttgagataaagtggttatctcgagtataagaccgttgtgcattgttactgcgcacgcgaccttgttgctaatagcaatagtgtgatagctttaaacattagaccc

SEQ ID NO: 7 - DNA, 153 bp, Homo sapiens
ggccgccggggccggaggctgcttctctctggcgcgcggcggcggtgactgacggcggcggctccgagggacgggcgcgcacccagctccccggccccgcctccccgggcttcctgcgagccaggtaaacacaggccgatcccgccgggcccg

SEQ ID NO: 8 - DNA, 141 bp, Homo sapiens
gggaagagctgcgggcacggcggtggctcggtctcccggctgcgcgcggagcgggagggctctcctcacacaagcgcttccttgccgagaggctggagctgcggcaccgcaggcctgagccaccccttctctgctgtctcc

SEQ ID NO: 9 - DNA, 150 bp, Homo sapiens
cagtgtcacgggagggaggtcagggtcagggtcagacgtggagccccgtggagtgcggagtggtgaccccttcgttcgggggcggagggatgactgagcatttataacttttgtgtatctccccgtgggtgcagcccttggccagcgaga

SEQ ID NO: 10 - DNA, 241 bp, Homo sapiens
ggggggccctcctgctggcgggagctggcagtgaagtctcatccacccccttgctggagtgattatggcagcagcctgagaaggaggggaccgggcgaatgagcggagccttgggactctcagaaacggacaggcagtgccaccaaggcggcagataaaagggtgcccagggaggctgatggagtcgaactctcaggtgggcagggaccgagcacccgccagagcgccctaaggagcctcc

SEQ ID NO: 11 - DNA, 141 bp, Homo sapiens
ggagaaagagaacggcgggagaagcggggagaaagagaaggagggagaccagcctcgcggggcctgctggttccttcgcgcgtttcccattcatccgcgtgaggcgccgcgcaccctgtcgccagctcctttcactctgct

SEQ ID NO: 12 - DNA, 145 bp, Homo sapiens
cggctgaaccagccccggctgggcagcagcggggacgccgggggccggggccagggctttccgggcttaggtgaggccgccgtgggccccatcttccggcggtcgccggagtttgtggtgattgttgctgccgccgccacccccc

SEQ ID NO: 13 - DNA, 252 bp, Homo sapiens
tcccggatctagcgggccacttgcaatgcgagggaccaagggggaaagtcgcctagcttgggaccgtctgacttgcaagcgcatgcatcatagagggccgtgtggccatccagcatttgggaaaaactgtaataaataaactatggcagttggcctctggttatccgttcaggctttgccccagttaacgtaaaaggtcagctgatggtatgatacacttcagcgatcctggagcgatctttgaactgccta

SEQ ID NO: 14 - DNA, 137 bp, Homo sapiens
cccgcaagaaacgcggtccggagagggtctggccccactgctggggcaagggctctaggcgcccggaccccacgcccgcagcctgcggagaacgtgccgacaaggacctgtagggccccactccccctcctccctcc

SEQ ID NO: 15 - DNA, 144 bp, Homo sapiens
gcacagtccagtgggagcgatgaggtgtttctaggcccccaagtcacagaaaagcaggcgattgggaacaacggaggcgcggcgggcccccgggccgcgggccagcgccaccttctggtggatcttccccgacgcgagtctggg

SEQ ID NO: 16 - DNA, 139 bp, Homo sapiens
agcctggaaccggcgctccggggcggcggcggcggcggcggcacccaggccggcgagcccaagacagcatcgcagtttatttacaagcccggtgccagccgccctcccgcccgccagccacacgcgccgccgccgccgc

SEQ ID NO: 17 - DNA, 392 bp, Homo sapiens
ctccaagtatgtggaccccaagttccctccgtgcgaggagtatttgcagggcggctacctaggcgagcagggcgccgactactacggcggcggcgcgcagggcgcagacttccagcccccggggctctacccacggcccgacttcggtgagcagcctttcggaggcagcggccccgggcctggctcggcgctgcctgcgcggggtcacggacaagagccaggcggccccggcggtcactacgccgctccaggagagccttgcccagctcccccggcgcctccgccggcgcccctgcctggcgcccgggcctacagtcagtccgaccccaagcagccgccctccgggacggcactcaagcagccggccgtggtctacccctggatgaagaagg

SEQ ID NO: 18 - DNA, 144 bp, Homo sapiens
ggcgcgcagagccacggtttgctccaggcgcgtcggaaccgcaggacttttcatccccgtggtcccacggtcctcccgcgccccggaggcctgccagccccgctcggacgctcgtttgcccctaacccgccgccatggcttcac

SEQ ID NO: 19 - DNA, 138 bp, Homo sapiens
acggtgagcctcgctcgcggctccctcgctgggtctgaaccaggagcagctgagaacgtgccggggagaggccgagctccgactcactcatcccttagcaccgagccgcctacttattttaatccaccaccctccctc

SEQ ID NO: 20 - DNA, 172 bp, Homo sapiens
actccaccctgcatttgcagagatccgtcgctcacaccttttcttgtcttccgttgaaaaaagagaatcgtgggagtaggacctatttgccaatctcctggtaacactatcacaactggccacttccgcccaacgcccggtagtctgagagcctccaaggtcctcccccgca

SEQ ID NO: 21 - DNA, 158 bp, Homo sapiens
ggcacgacccacttcctcgggctccttccacccttgcagggagcctgacactgagggctggcggcttttctggcgcgggccagggggaggaggagaaaggagctcccgggatcccctcgccccctcccccaactgcccggtgagtaatgacattcacg

SEQ ID NO: 22 - DNA, 135 bp, Homo sapiens
aaccaaaagaaaggggagaccccagcgcggaggagacgcgggagcgcggggtaggtagcagcggcggctgcgtcgctaaaatgagtgcagaaacgaggaaggtgggcggcgggaggggacaggctgcgcccgggg

SEQ ID NO: 23 - DNA, 170 bp, Homo sapiens
cggctgggcccggggcgcgcagctgcccgccggggcggggtgagccggggctggagggcgggctggggtcgggcccagtcggggctgcccgcggggccgggagcggggagcgtgctggtcgggagcggctcctccgccggcttttttcaccgcttctcagggtgcagacc

SEQ ID NO: 24 - DNA, 428 bp, Homo sapiens
gagggctgggtcctgccctcctggaactcgcattctagggaggacacagagagcacaaggccaggcaatcttcaggaggcagaacagacaagccctggtgctgccaagatggggaggggcaggtggggaggggaggggaacgcctccaagcaggagggttgccaaactgtgagtcagcgaccacaggaagccaagcagatctggacatccacgtgggtctctggccaaacaggaagtcagagttcaccctctgatacacttggttcctgttctctctctgcaaacaagggcacaatgatctcatgggggtggggccgggagaggaagccgggttggacagaggtggtttcccagtttgtctttaaccaagtcaaagaggcctcttaccagcggaatgaccttctcctcttccctgcatctcttcttta

SEQ ID NO: 25 - DNA, 227 bp, Homo sapiens
tctaaggggagaaataggagcgcacacatgggtcacccaacgaagcaaggcgtccctgtgaactgtgcggctggctcttgggggcaacaccagggctgacctgaggaaagggcaaccagtactcccagcgatgacttcgggtcggcggaaggaaaagacctgagcgctaagagcttgggatacgggtcaggcccatccttaggggaaaccggctgggaagcgagggg

SEQ ID NO: 26 - DNA, 217 bp, Homo sapiens
tgtggtctgttgcaggggaaggggccgagctggaggagcgagcgggcgggcggcgcttggcacatcccgaagaacgctgcctcggttgcctgcgaacgctcagggcaggcgccaagggggcttcagggggacaggagcccgtgagaaaacttagctcgccgcgctctgctcagctctacccggctccgctctcaggcgtgtgctcagaacacaccga

SEQ ID NO: 27 - DNA, 136 bp, Homo sapiens
gtggagcagggacccgaaccggtgcccatccagtccggtgccatctgaagcccccttcccaggtgagactcgtagcgctcgctcgacagggtctggtcccacccacaaggcctggggcgccgtggggccccgtctc

SEQ ID NO: 28 - DNA, 159 bp, Homo sapiens
ggcggcggcggcggcgatgcggggctgctggaggcggagaggcacggaggagccgctggggctgccgccacggccgcccggaggtgagcgggcgcggggccactgtcgccgccgcgcagtcccgcgggagggggcgccggcccgagcgtcgtccctgcc

SEQ ID NO: 29 - DNA, 147 bp, Homo sapiens
ccctggtcagactctgggtcagagcgctaagtttcaaggaggcggcgctaaacaggccctctagccgggagcctgtcgcgacccgagcgaccgtgggtcgaccccgatccggaagtgacgcaacggcgccaagcacttccggagctg

SEQ ID NO: 30 - DNA, 318 bp, Homo sapiens
cccctgcgggacccacgcggggagtgggctggcagtgcgcgcacagcggcggcgagtgggtcgtgcacgcggatgcggggtgggagtgggggcgcacgcgcgggcgtgggcgagcgggccccggcagtgcacacacacggcaggggcgggcgacagatgcagtgcgtgcgccggagcccaagcgcacaaacggaaagagcgggcgcggtgcgcaggggcgggcgcccagcgggcttggcatgcgcgcccccgcccgaggctataaaagcatcgccacctgctgccactagccaagccgcgcgtccagttgcttggaga

SEQ ID NO: 31 - DNA, 160 bp, Homo sapiens
cgtccggatttcttcccctactccctgcagaaaagaagagtcggggacctcctagccagttacattccagaggatgaggcgctgatgcttcgggatggacggtaagagcaaggagtggctcaagcctgagggttctgcggttagaggctcaatagacttt

SEQ ID NO: 32 - DNA, 413 bp, Homo sapiens
agaagaaccagaaggtgggagttggcgcgcggaaggccaggggtcagctcaaccggagagagggaggaggtaggggctcgtccctatcagcggcgatacctcattgtcccaagatcctgtagcgaacgtctccgcggtctgtaaacttcccggaggcagcggtcgccagcgggttttgctgattttctgggacacaaacttcgcataaatttcctccatgccgaaagcggccgcagcaggtactgcaaaaagcaagcacagtacgcgcctctcagcaccgcctcttcccgcggaaccctgattggatgggactttaggacggagacggtggctgcagagagtcaattctcgtcgatagccagtgtgggcacagtcagtacctagactgagaggcccacccatctcacagagca

SEQ ID NO: 33 - DNA, 251 bp, Homo sapiens
ggccgcgtcacggcggtgactccccctcccctcacgcccgcgacctgcgagctcccggagctggggaaggagcggacgccgcagagtccccgtccctggccatgcaagccggcctggcgaccccttcctccgctcccggattagctcccgcccggcacctgccttgccgcgacactgattgaaattcaagccggcccccgcctctgaccccggccggagcagggaggcaaagagtgctgggagcggctttg

SEQ ID NO: 34 - DNA, 218 bp, Homo sapiens
gggcctcggcggcgcccacggctccaaccggagctccccaggcgctgggcggtggggggatccccggggcgaaaggcgtcgccgcggggctgcagcgagcggcgggtgcagagaaccgtggtgcgcgctcccgcctcgcgcccgcagcccattgtgcttactgtgaatgaggcgcgcgcaccaatcagcggtcgcttcgctccccgcagccccgtccc

SEQ ID NO: 35 - DNA, 149 bp, Homo sapiens
cagagttcctgccaccctgggatccccgcccccttgagggcgccccgtccaggggggctcgcggggccgaggtttggggcgccgggaggagcgggaaggcggggacgagagggacggagcgggctgactcgggatccgccgctgcacct

SEQ ID NO: 36 - DNA, 160 bp, Homo sapiens
cacggcgcgccgaccctcgtgggcaggggcaggaccagcgcgggggcacgtcggggggtggaaagcgggaagaccacgcgcttgtgactgtcagcattcaccgtgaagtccgtgtctataggaggggacacgggcaggctggcacgggctctagcgctaa

SEQ ID NO: 37 - DNA, 241 bp, Homo sapiens
gccgatgacccacagtaacaggtgttctccatctctgatgtctgtgattcatcctgcacagctgcgcgcacacagcacacgcatacacaggctcccagaatacggcgccccacacgctgtaccgcccgtcgcgttctggacgccccggcgaccacacacaccgagacacacctcagcgacaacctggatccacaaaaaggaggccctgcccccttaaaaaatactaacaccttactgcaaa

SEQ ID NO: 38 - DNA, 239 bp, Homo sapiens
gcgtcgctgggtgagtgggggcagctccagccggggccgggggatgagggcagggggttcccggagctgggggcccacgtccagggcttcccaacaccgccgctcccgggcttcccgggaatccttgccccgggtggcgggggcgctggggactgggaagcgcgcggtgctctccagggtcctgaccgccgagtggccggcccctaggaaccgcgttcgaccgccctggagcgccccct

SEQ ID NO: 39 - DNA, 623 bp, Homo sapiens
gatgcagaaaggcagcagccaaagcctgcgggttcctgcaagggccaggggaggggcgagccctacaggcaacttgaacggagagctcacccgccagcccggaaaggcaagccccagtcaggcggaaggtagatggtggaggggcgccgcggcggatggaggtgcccagggccacagaccgctcacagcggtaccggggcggggagcagggcgggcagggaatcggcccgcccttcgtcctgcccctcgccctactctgtcaccgcccctgggaagagtggaacccatacttgctggtctgatccatgcacaaggcggggctgctaggcctctgtgcccgggcttggaattcggtgcggatggccagctccgggatgacccgccgggacccgctcgcaaataaggtggccctggtaacggcctccaccgacgggtgagtgctccggccggagtttctgaggccctggctgcctggaaacaggcactggcctctcatcctcggcctccggtgcccctgtcctcagaccttacacgctgccaaagtctggccctggaaaaaaggtagccacgtggtccgcctgaagccactccgaatcccctagccctggaccctcccttgccag

SEQ ID NO: 40 - DNA, 355 bp, Homo sapiens
accttctgtctcatcagccaggccacaaacgcgatgtttacatagccatttaccggaagcaagagcctggaccacagagcagatcaccagcagcatatggctcacgtgtgggcgaccaacaccacttgaaaagcagaagttcataagacagaaacacatatgagcatccgcctgtctggggcaggaaagctgagaaagaggcacaccaagactaagggaaagaggccgggaagggtaaaaaggtgaaatgaaaagaggttggtgaatgactaagaacggttggataggacaaataagttccaatgttcgatagcagacgagggtgactacagttagcaatatattgtatatttca

SEQ ID NO: 41 - DNA, 159 bp, Homo sapiens
gcacacgggtaggaggagctgctggccgtcagtgatctgtgcttaagcttgacatcatgggctgaaatgtggggaaatgcgtctgatttttgtaagccgccctcgtgttcctttctagccgtggtagctgtgacatggggggcactggttggcagctgg

SEQ ID NO: 42 - DNA, 183 bp, Homo sapiens
cagcccttcccgcgccccaggcctcgcggaaccccccgccccggtctcgtccccaggcctgcgcaccgccccgacccgaccccagcctaccccggcctctccgcgggcgcgccacaagcctacgcagccctggcgactccttcggcccgcggcccagcacgcgcaccatccgggcctccggcg

SEQ ID NO: 43 - DNA, 158 bp, Homo sapiens
gaccgtctgggccctaaactcagggggagactcccggcgtcttttgattccctgtcctcctgcagctctctgctggcgggcgtctaaataaagtagcttccccaaaagacccaagatcccaccgtggctgtcatctgacccttctggagactatcagt

SEQ ID NO: 44 - DNA, 133 bp, Homo sapiens
cggggaatctagggggcacccagctcgctctccccacccaggccgggggaatccaaagcgttttaaatcgctcccagctcgcaagtcgcctgcattcgctcagcacggccgtcttgacgcaagagacgcaggg

SEQ ID NO: 45 - DNA, 205 bp, Homo sapiens
tggcacgccaaggcaaaggcatttacgccgcggtacaaacattgtcagatctgatttaatttctttaaaaaaaaaattccttgaaatggaaccttagcttcaattgctcagtctgcccataacagagtagaaggacctgatcgcttttccctttagccggcctcaaggccggcagcaggctgcttggcaggaggaagcgatttcc

SEQ ID NO: 46 - DNA, 136 bp, Homo sapiens
agggcaaagaagtggtcacatctgtgggccagactggtgcgcgatctttggaggcgcagcagcaaggccgcgccagggctgagcccagaccgcccacgaggaggcccgccaggcccggagcagcggcgcgtgcggg

SEQ ID NO: 47 - DNA, 156 bp, Homo sapiens
gccgggaccctgggcgtcctgtctcctccctgctcagtgactgtgccctggcctggagccctctccgggcggctttgcacccgcagcgcggcatctctccccgattgtgcagggatgccgggagggtcatcaggggagaatcctgactcgggatgc

SEQ ID NO: 48 - DNA, 141 bp, Homo sapiens
gagagtggtgggtggtgtgcccttctctaaaacctgggcggcggtgggggatttgtgtgccagaagaccttccagggtcggttgcggggatgatgtgggtaaggggtctcctccagagatcagcccctgaccccgccaggg

SEQ ID NO: 49 - DNA, 212 bp, Homo sapiens
ccccgctcacctgccaagtcccctcctcccgtgacggcttcgggcctgtcccccatcctggaaagccccgtggcccccgcgagctccaccccttgttccgcccggtgccttgaggggatccagccccgcgtgggctcccgccctgcgtgggctcccgagtcacgtcgatgctggccccgctgtatcaccttcgaaaccgaatttctaatttg

SEQ ID NO: 50 - DNA, 136 bp, Homo sapiens
cggggcagggggtcccgctgctacggattctcagaactcccgcgtccgctcacaagagccgcgtttcccgtgaactgcgcctcaatcgtgtcactcgttttaaaaggcccggggaagcctcgcgttcgtcgcgagg

SEQ ID NO: 51 - DNA, 136 bp, Homo sapiens
gtgtaggccccgagtgatttcctgccacagtgccggagcgggactggcgctgcctcccgggtccaggttccagccgctcccagctgttggcggcgctgctgagatgatggcctggatcccccaggttccgggactc

SEQ ID NO: 52 - DNA, 275 bp, Homo sapiens
cgaaggctggcggaggaggaggtgagagcgaggactcggcagaagcgagatccgccgaagggaagtccgagcagtcggggagctcaggggggccctcccggggagagggtcgcgggctccttctgccgcttacctgtcgcgccgaggcaaagccgcagccgcgccgcggggtggctcccgggtttccccaccggacggccgggagggtgggaccggggcgggacctcccccagctgcactaacgcgcccgccccgcccctccctggccaggtgca

SEQ ID NO: 53 - DNA, 251 bp, Homo sapiens
tcccgaggaaactccgctgccgaccctgcctgagcgcgggagcctgaggaccgggtggaggcggtggggacccagccgcgcgccgggagcgctccccggaatgagccgccccacccaccccaaggctggagccgctgcaccctgctgtccctctccaggccttggcaatgacgatcccccaaagagcccgtctgcaccccagacccagggcctcaggcctccagctcctgggatccgggagtccatcccgg

SEQ ID NO: 54 - DNA, 315 bp, Homo sapiens
accaggatgctgagttccacaccagcgtgaggagtcctctgtgtttctaagaaccaggcttcaggaaatgcacggggattgtgtgcagtctaagagactaaagctgggctaaaaatattttattgtcattgttaagaaagagaaaaaaaaaccctatcttgggtaaccccaggttagataaataaatcagtcgcttctcttgacactttcccactccacccggcttcttcctggatttcccattccggctaaatcttcataaatccaaagcctccgtgcaaacggaggtggagcaaaacagaaataaatgtcaaa

SEQ ID NO: 55 - DNA, 139 bp, Homo sapiens
aataccagcttcttcatcactcggccaatcagctctccatcactgtgcctaacgtaaccctgcaagatgaaggcgtgtacaagtgcttacattacagcgactctgtaagcacaaaggaagtgaaagtgattgtgctggg

SEQ ID NO: 56 - DNA, 139 bp, Homo sapiens
cacaagttctcatccgtctgctccgccgattcagccagacaaagaccgcaagttccccggtccaccgctccagacaggcggggaccagtctccccgaattaggcccattccgggcccgggcgccctcactcgccgcggg

SEQ ID NO: 57 - DNA, 319 bp, Homo sapiens
gcgccttaaaacacgaacaatggaggccgcaccaaccgccccttcctctgagtagcagacaactgaagaggcgtcttgccggcgtgtcccaataaaacccggtgcgattggctcccgccttaccccatcgcttatgcctattggcttactttgtcaaaccgggcttatgaaccaataaaaaacgcctactgtgtcaggaactagccaataagaactggttctatagtaatgacgaatttttgatcagacattaggtggcactaaagaagtcaggacaacgactacgtagtgttctataacaatcatgagaaattttagt

SEQ ID NO: 58 - DNA, 138 bp, Homo sapiens
tgccctcctgcctgctcggcaaagggcattcgaggcttatttgtgtggcacgatctttactggggcggaaaacacgcggcgggggaggagcgggcacagacgcagccgggcggggagagccaggaatgttcctcccgg

SEQ ID NO: 59 - DNA, 139 bp, Homo sapiens
cgcagccccgcctggaagcgcagcgcggtcggtcgcgcgcccctgaggcttggaggcctgggcttcccccagcagcgctcgagcaccgcccagtcgagcctcacaccggatgccacttcatatttgggcccagagctca

SEQ ID NO: 60 - DNA, 139 bp, Homo sapiens
tggccgggcccgtggctccgcctaccagggcggggctcatgggaggggaccgagccgccctgctggggccctgacggcggcctaactcaatctaggcagtgtcccgtgcgtttggcttagtgaccaaatttaatcacac

SEQ ID NO: 61 - DNA, 148 bp, Homo sapiens
aactttgaggtgaaggctgtcagaaacagctgcgaggagcatccagcctagggctcagcaggtgtgacttaaaggatcgcaggtgacagccctcagtggacttctgtcctcaccatgtttcccactggcacaggtggggcggccacgc

SEQ ID NO: 62 - DNA, 136 bp, Homo sapiens
gctacattccggtttgtaactacactaaacgttagtgtaccaagaaactaagagcgtctcaaagatgacagtctgaacgtggcaggtgaccttaaaaagccactgagttcaacccctttataaatgaactcaaaaa

SEQ ID NO: 63 - DNA, 414 bp, Homo sapiens
gctggagggcaggggtgcggcagcagccatcacctacctgcgcccctgctccaggacaaccgcgccagccgctcaaccacgctcccgagcatgagccctgcagcaaaacaagcctttatagcggcatcggccgccacaccgcgcaagcgcgctgcacaaagcattcccaaggctgaagggaactgtagtcctccttccgagtgcccagggctgcggacgcggcgaaggactacatttcccagaagcgccggtgacatcccgggggcggtgcgggctgcccctcttcccaccgagctcccggctctgttccatccttccccgtgcctctgcgagactgtctggaatcttctcaggggtcgtgttccctgggggaggcagccgggaggcttaaccgtggccctgtgttcgcacaca

SEQ ID NO: 64 - DNA, 868 bp, Homo sapiens
aaagagaaactggtgtgtgtaggctgcgcactcccagggagacagggagacgggccgggcgccggagaggaacccggactctgcccaaagtctcgccgcccgccggctgttttctggcggagggtgtgccccggagggcggcgatcgcgggtgaaggctggggccaggcgcgggtggaggcgtcaccggggtcgggctagcaggccctggaatcaggcttttgggacaccccgaaagtgagtccaacttggggagaaactgagggcagctcgggcggtctggcagcggagaaggtgggtgggagaaaactttacaggaaggcagaagcaatctctgccgagagagtcagccgagcggccgcgcggagaggaggggcgggcggtccccaggcgggcgggtgcagggcgcagggcgccgacctgctggagagggggcccgggcgcgaggcggagtcccggcgcgcagccaggctggtggaggcccccggcaggctgcagattccctccggctccgggagccgcagcaggaccggccaggaggcgccatggaggggagccccatcccggtgctgacagtgcccaccgcgccctacgaggaccagcggccggccggcggcgggggtctgcggcgacccaccggcctcttcgagggccagcgcaactacctgcccaactttatccagagcgtgctgtcgtccatcgacctgcgcgaccgtcagggctgcaccatggtggtgggcagcgacggcaggtactttagcaggacggccatcgagatcgtggtgcagatggccgcggccaacggggtgagtgtccggatgcccctcgcttcccgccgcgccgccgccatgccctctcctagcccttgt

SEQ ID NO: 65 - DNA, 138 bp, Homo sapiens
gagcaggctgagtcaagctcaattgagtggatggggctaggacagagagagttaggggcagggttttcactggtctccgtaatcagtcgctgccgtccgccaaggtgtagatgtgggaacaagcttaaattctcaaac

SEQ ID NO: 66 - DNA, 150 bp, Homo sapiens
agcgcggagcggcccggacctcgcggggacccgaggcgcggtgggggctgtccagaatccctgagtgtggggtccccgcgagccgccgccgcttacgagcgtcccccgcgcggagtgagcccagggccacgggggcgcggagattcagag

SEQ ID NO: 67 - DNA, 156 bp, Homo sapiens
ctgcccgctgcgatcttccctaactaccactctgcggtcgcagaagaccatccagaggggagatgaggactgggaagcccgcttgagtgatgcacatctgtggcttgttacgagagccgcgtgaattaaagcaaggcaggggacaccgccctgcca

SEQ ID NO: 68 - DNA, 361 bp, Homo sapiens
cagcctgtgcacatgcttaggcgcgcggacaacatgcgcatgctcagactctagactggccacgggtggccgggtgcgcatactcaggctctgagcgcactttggggtgcgcggattcgggcttcccgggattcgtctgcgcatgctcaagattcaggcggagcgccgggctgcagtgcgcggaggcccgctcccgggactcattgatgcgcatgcgcagggcttcagcctgcacgtactcggattgtgcagcgactccccgtggcggttgaggggcagtggtggcggcggaagcccaagtcgatgctgatgttgatgctggtggcggctgtgaccatgtggctccgaccgctggtcacag

SEQ ID NO: 69 - DNA, 140 bp, Homo sapiens
ctggatggagccttgccggatctcccgggctctgcagcccctctgcggtccctgatgctcggctcctcgcgggggcgccccactccggcttctgtgatgtcagcgccggaacctggaatcccggctccgcgagggaaggc

SEQ ID NO: 70 - DNA, 186 bp, Homo sapiens
gacggccctggcggcgctgtgttgctgtaaacagccgcttccctgttactatctatagcaggatctcctggctcccgggcgcggcggctggaggcaggtctgcggtccggctccccgcgcgccccgaactatccgcccgccggcctcatcctgcctcgcccctctccaggtgcccaccgcgggccc

SEQ ID NO: 71 - DNA, 151 bp, Homo sapiens
ttgctaagtactgggatctgaagattactcagccactgtctccacggagatcatcgttaacgggagagaaagccacgtaaaacaccacgttagatggagaagcacagaggacaccacctccacgaaaaagtctcacacgcgagaaaggacc

SEQ ID NO: 72 - DNA, 272 bp, Homo sapiens
gagagtaactgcaattgtgcttccccggcaccttcgctttaggtcactccaccgaagagcctgaaagggaagtggttcttgcgaaagaatgagctgaagcaggtggcagatgctaccaggcaccgtgtagttttcaaaggggatctttttctgcctcagagagaaattctggggtttgcacagcaagaaaccgatgactcaatttcctttgtgtccctgctttaatgggaaggttgtaggcgttctttagaatggcagggtaggttgatacc

SEQ ID NO: 73 - DNA, 272 bp, Homo sapiens
cagggcccgagccctgacggcggccgcccccggccgaaaagtaaggaaggtgccgccctcgctggaccagctgggcccgaagaggggcccccccaccacaaattcggaaaccgagtgaccccggcgagggacgcgcggtcccagccccgggacgaggaagggcggcggcgcgggcgggggttcttttcagaactacagcagggaaggcggcgggggtggccgcggggcgatccagggaaaatcggcgcctcacctgctcctcttgaggcagc

SEQ ID NO: 74 - DNA, 175 bp, Homo sapiens
tggcgccggagctgctggcagaggggcggcgggcggcggcggcggcggctacaggagggactgacaaagccccacggcacgccgctccctacttatagcaccggcgggtcgccatggagacgcaccagctcaaaccagccacgatcggttccggccgggacaccgccgggggagg

SEQ ID NO: 75 - DNA, 152 bp, Homo sapiens
cacacacacacacacacacatatatacacgccagcgagctgctggccgctcaatggaccgatttccccggtttccctgaacccagcccagcccgggatgagaaactgcaaaatggcccgggtcgccagtgtgctggggctggtcatgctcag

SEQ ID NO: 76 - DNA, 306 bp, Homo sapiens
cgccctggggagatggcggagcccggcccgctctcccgagcgcaggtatctcacctggatcaggcgagggtcacgccaagccggctacacaccacggaaaggagcccttccgcgcttttatcccaccgaccaatcgcacagcgactagcaccgattgacaagctccacggaccagccacttgcgcgtatgggcgggactaagctagccagagtctagaagcccgcgctaagggttgctagggacgcaccaaacacccctacggcgcttcggaggagccaaaggaataatgggcgcctccgcccccg

SEQ ID NO: 77 - DNA, 144 bp, Homo sapiens
ctcctttcagacccgccctcctgttcacagggacccatttcggagccctggctcacgctgggcgggaactgccgtgacgaattccccccaaggtgttgattatccatcccaacccagcctctggcttccctcccacctccaccc

SEQ ID NO: 78 - DNA, 160 bp, Homo sapiens
ctgaggaagtgctcatgtcataagtcaaagcgacattttcatcagcccaaggtggcaggcaggataaacgacctggccgtgaatgcacacgttgagagggaacagtgaaaagggccctcaggaaatacctgtcgaatgctgactcctaacccaacagggc

SEQ ID NO: 79 - DNA, 166 bp, Homo sapiens
gagctccaccgcgggcagctggagggagtggggcaggacgctgagcgccgggaggggtgtggccctcctgtcctgcccgcggccccacaccggccccagtcccgcccgcctcggtccctgccccgcgcgccgacgtcaccgggacctcccgatcctcccggcccag

SEQ ID NO: 80 - DNA, 145 bp, Homo sapiens
ggaccctgcgggagggtctggcctagatgcgagtttcccgccgcagaccaggcgaggccacgcgacatatcccctacccgcttactgcaggccgcagacggagacagtgcagccctgcgcactgctgaggttgcccgaggtctca

SEQ ID NO: 81 - DNA, 144 bp, Homo sapiens
ttccctacacgacacgcggaatcccccagccctgcaatctcgggtcctgaaatctaccttagtccgtacctcgagaggcggagaggatcatgtccgggaactgcggggtagtagcgatctgggttacccagccgttgtggccct

SEQ ID NO: 82 - DNA, 146 bp, Homo sapiens
tctcttgtatggtaatagtttagaacatcaaaaactgggttgcaccatttgcgattaagcagggcccctattcggtgaccgctgcgccgccagcctggcgcgggcctcctgcaagacaatggccacgacctgacgcgcgagcgcca

SEQ ID NO: 83 - DNA, 152 bp, Homo sapiens
cgaaaactcctgacgccgcgtaggcaactcgtctccacaggatagacacccaaagggccgcagcgccgcccgcacccggagggtctgcgctctctacaaccgccccacgccgttcccaggcgtgctaccccgcgcagtgcgcacgcgcgccc

SEQ ID NO: 84 - DNA, 256 bp, Homo sapiens
acctggaatcgagctgcgtctgccgagaagcgtctcgtgtcgaatttggcccccgcgccgagccggcgaaagagatcgtggacgtccatctttacccagaaagcgccacagttctacggcgcctgcgcagactacttcccaggccccgggcagcgtcggaagagggcgtgagcataattggctcctgtaggcggagcctggctgggtgagaaacgaggctattttattatcgtgtactccgtcattatttatcttt

SEQ ID NO: 85 - DNA, 151 bp, Homo sapiens
gctctgaaccatgtttatgcaacgtttaatgggctctaataaaacggctaataattttgatccgcggaagcaccgactcgctcgctaagccgaatctgcgagggtgaagctgcaactccaacgccggaaagcgcggctaccgaaaagcgca

SEQ ID NO: 86 - DNA, 141 bp, Homo sapiens
gctcacggggtagccggcctggcccaggtgacatgggtagcagcccctccagaggtagcggtagtgcgtgcccgcgacgcgcgccaggccccccaggagcccaaggcaccagagcgcggccagcccgcggtcccgggacgc

SEQ ID NO: 87 - DNA, 257 bp, Homo sapiens
ggcagacagtccgagggatacgaccggggggctgaggccaggtatgctttacggcactgccgggcaatgaagcagcccgcgctaggagctggggacgaccacgatgagaacagaaggacacggggtcgggagcctcgctttacggcatagcgaggtgacggagcggctccgagggggacgaagacctgggcagggagcttttgcgacagtgggagaaagacacgcccaccgcaggcatctttacgacggtggggtgc

SEQ ID NO: 88 - DNA, 261 bp, Homo sapiens
tcaactgacagcagtgggtacaggcccgaggtgtgcagcaagctgggaagcccagaggccgagaagctaaagatgccctggagactggaggagcgcatcaccggtcagtgcgccccctccaggagcggcctcccggccctctcggccttaggcgacaggtgcagcagctgtctctactgcccgctgtgccagggcggctgccgagcactggtgcggaaccactatcggaacgagtttgcacttctgtttacaaagcaatcc

SEQ ID NO: 89 - DNA, 388 bp, Homo sapiens
cattcacatctgtcaagatgcagggggcagagcccgaagctgtacccaatcaggggcaccggggaggagctctgcgatcggtccaatcaggcgcgccgtcggggacgcagctgcagacgttcaaccttctcgcgggattttcatttctcgcgtctgccgtacttggtttcgcttcgctagtcccagaggcccagagtggctcgcctggagtctctgtggcgcggtttcctgtacctgccttgggatccggagggaggaagctgggacacccgggagtcaggaaatggtgagtgtgtcgggccctgcgtcccgagacagggaggaggggctggttggacgaccggaactggctgtggcgcggcccgggccttcccgtgggcgactctgg

SEQ ID NO: 90 - DNA, 209 bp, Homo sapiens
gcggtggtcggaagcggcgggaacccgctgtaggggcacccgggcctccccgcagtcagcctcggggtctgggccccgagtcccaactggtgcagctcggccctcggtcccctccgctgcaagatggcggccaggccggcagccgggaccccgcgtgtcctgtcccatcccgaccccgcagagcgacctcgtccctggccggagccctc

SEQ ID NO: 91 - DNA, 144 bp, Homo sapiens
gtagcagtcactcggagcagaacggtagttaggaaaaattttcaagtctccttcggctgcggggtcgcgccattccaggcggtgccaactgggagctccttcacccgccccaggccgagaaacgcgatcccagttggtcaggga

SEQ ID NO: 92 - DNA, 265 bp, Homo sapiens
aggaggaggaaacaggtatctgttctcggtggcccccacccagacaatacggaagcgccccgtggccccatggatgggaccggatgctggctctctgccttggccaaggcatcccagcacagggaacagggagagaggatgggatggagggagagaggatgggatggagaaagagagtagctcggatgctgaaacaacgttcctcctaggctagtcttggtgcagaagccccgcagctccggttttagaatcccccagcaggccc

SEQ ID NO: 93 - DNA, 137 bp, Homo sapiens
tcacacgggtaaagtctccatatcctatgctccattgtagcgctgcaggcattaaccttagtcctaatggttagagtcgtccctgttagcaaaacgactctggtttctaggcgattaagtttctccaagatgggtgg

SEQ ID NO: 94 - DNA, 193 bp, Homo sapiens
atcttaggcgttcaaataaaggactaggaagcaaacacccaagcaccggggaacagaacagaaagtaagcgagcccgggacgcgaatttgagggcaggacttcgggagccagagcctggcggcgctgccgcagcgggtcactcccagggggccggcacccagacttggcatcgttagcgcttgggtgctctgt

SEQ ID NO: 95 - DNA, 513 bp, Homo sapiens
ttgatcaaatcaaccccagagaaactttcctagggccagagagcatctcaaccgcgaaagtccgtttgcggcctccttctccacttcaggcctgcaaagcggctgacggcattcgcagtggctaggcaacggcccgcgcagacttctcggcgttagccccgcctcttgaggcgcttccgccgccgggctcctggacacgcctcctttaattggctaacgtcacgctgggagtgggcggggaaaatatgtcagactgtgcggtcacttccggcccgggagcgcgcgggttgattcgtccttcctcagccgcgggtgatcgtagctcggaaatggcgggtaagttaccgggaaaagtttaccaaggggaggaggcggccagatcggggatagaacgccgagacggtggtgacaatgcccgcctagaactttcgggctgtagcctgggttccagaaggcctgcttgggaccggaagcgcggaactctcagcccagcagctccttgttggcggcggt

SEQ ID NO: 96 - DNA, 180 bp, Homo sapiens
agaggaaaggtgagaagaggttccagtctggggcggctaggactggggtgatggttctggaggcggcgagggaaggtgtgaggcgaggagacctctcgaatcgcgcccgccccgcccagggccggattggctcccaacccaccctctttgctccagggcggccgccgtcctcttgcgcag

SEQ ID NO: 97 - DNA, 142 bp, Homo sapiens
ggggcgcgggcgggcgcgcggtctcgggcgaggcgggggattcaagcgcgttataaggcgaggagcccggggcgtccgagacgccgcgctcggagccgcgagggaaccgccgcccgcatggccccggcccgccgccccgccg

SEQ ID NO: 98 - DNA, 146 bp, Homo sapiens
tccgcggctgggagggaattggttgaaaggaattggggggcgcgggggtggtccgcgatatctgcctcttccgccactgccacaccggcgtcccgcgtcgtgccaacggccgggtcacgagtcttgagtctgttgggcgggaaaag

SEQ ID NO: 99 - DNA, 966 bp, Homo sapiens
taaggaagagctaggcctgtccgcgctcccagcccccacgcagccagacacccgcgggtgctgagatgaagagtgaagtcaccaggagagacaggaaacagcgcgggcctcggggacccgagggcgcggaagctcgggggccggggtcgagcacagattgggaggcgcagcgctgggcgcacgtccccgtcggcccggcggcccctaatgaggcgcgctgtgcgcagactgctaagagcagcatgagcacggctccggcggcccccagggccccgcgggtcggcgccaccccggagcgcggtgcccggaatcacttagcgccatcagccgggcggctgggagggggaagcggccgatccgggcggctgggagggggaagcggccgatccaggcggcagcggagggggctgcagcggaggcggccccggcttgcacgctcgcccttccgcctgcccggcagggccccgtctgagccccaggccccaggcccagcggcgccgctcgccggtgaaggaaaccagcgcagagaggccgcgctgccaggcgcgtggtggtccgggggtccacgtgtgagcctcgccctaggctgccaattgagagttccacctccgcccagagagaccccacctcacccctccaacctggggcgcgcgggccggcggaggggtcctggggcgagtgggcaggataggccgccgcgcggggtgggcttctacggggtgtactcgttgcctgtggctggggactgaaattccccggaaaaggagacggggaggacacacctggagggataaacagcttgtgcagggatgtgaaagagagaacccagctgtgtgtgcgtgtgcgcgcgtgtgtgtggtagggacgtcatacaggacgcgtggcctacgaacgtgctaaaccactggcaataaaaacacagagtgtggggccgggagcggtggctcacgcctgtgatcccagcac

SEQ ID NO: 100 - DNA, 148 bp, Homo sapiens
gagctgcggctggactcgcacccgtgcctggaggtgacggcggcggcgctgcggcgggagcggcccggctcggaggagccgcctgcggagcccgtgagcttctacacgcagcccttctcgcactatggccaggccctgtgcgtgtcct

SEQ ID NO: 101 - DNA, 146 bp, Homo sapiens
cttccggtcgctgagtggttgaggccggaagacaacgctcatcgtcattggctgagcccggctgtcagtcctttcgcgcctcggcggcgcggcatagcccggctcggcctgtaaagcagtctcaagcctgccgcagggagaagatg

SEQ ID NO: 102 - DNA, 284 bp, Homo sapiens
ggaagggagagtgggacgccggagcccgcttctacatccaccttgggaaaagaccccaagttagctctcagggctcgcggaccggaagcacgcataaacttctaccctgtccaatcataagcctcacgtgacctgccgcgtagggagggcacgaacagaaaggtgctgcgcatgcgtattgaaaaacctcacctactctcgcgggtcctcagcgttctcctgcggaacctttgaacggggtactcgagcccacaggggaagagcagcggaaggggcctttcgga

SEQ ID NO: 103 - DNA, 173 bp, Homo sapiens
tgcggggccttcagtccgctcctggaggggcttgactcccgcagcctgccgcccgcctcacggtgacagcccgcccgggcgctgaccatcccggcccggctctgtttacaagcggcttctcgcggtcccactctgaaatgcttccgccggcggcccgggcagccagagccgga

SEQ ID NO: 104 - DNA, 174 bp, Homo sapiens
acagcgtttgaagccagccttgaaaaactttctaaacaagccataactcatgtgtggcttacaatcatagagagggcgcgctgcaaatgaaaattaccagcgcccgctctcgccgcaatccttcctcggtgcagtccaacctgctactgctgaatttttcttgacaaatatttt

SEQ ID NO: 105 - DNA, 156 bp, Homo sapiens
gccagctcgtggtccagccctggcggaggcagaggggcggcggagtcagggctggcaccggtcctaggtccggggatggcgccttcggaaccctaggctccgctcccaggccggccgctcccctccctgccctctgcccgctcaccagcgtactgc

SEQ ID NO: 106 - DNA, 137 bp, Homo sapiens
ggaaaaagcctagcaccgtgggggctgggaggctggagaaactgaagccacagaccaggtgccccgcaaccccgggcggggatgtctgtctcccaggcccccacaccggccgcatccgtccaagttgcggctggggt

SEQ ID NO: 107 - DNA, 245 bp, Homo sapiens
gctgaaatgagataaactacactctccgagaatgaaaaaggctgtctttgttgtgggcaaactgcatctctgcagaccttgttatcttttcagtgatgcgtttcctgaaagttttgtttaagctacaccatgcttgcaaactgttgctccttttcttgtgcaagaatggttgacagaaatgaagaagttgtttctctgagactatgtgaaattctggacgcaggcagagctgcttcagggccagg

SEQ ID NO: 108 - DNA, 143 bp, Homo sapiens
ggccaggcctcgtggacccctcatatgccacacgggacatgagcaggccggccgggagccgggtcccgggagctccacgaaggggcctgtcctccatgaccaggacacccgctgcgccttcctcccgaggcctcccgggcctc

SEQ ID NO: 109 - DNA, 154 bp, Homo sapiens
aggaactcttccggggcgtggcgcgtgcgcgatcgccgaggcgcgctgtccgggtggtgggagctcaacccgcgaccgcggctacgattctcttggctcctgccctcgccttagtcgctctgcggggttggttcggtcccggcacttccagagg

SEQ ID NO: 110 - DNA, 154 bp, Homo sapiens
cagctcgcctaacgcacaagccacgcccacaccctttctacacgctttctcgttcacttctcattgcaactccttccgccgcgtggacaggttcagcactctcggagtcgatgtcattattcgccatcgacgcgaacctcggcaaagagacggg

SEQ ID NO: 111 - DNA, 523 bp, Homo sapiens
aatagaaattaatttgtcagccagcacacgcagcccaggcggcgcagtagcgagctgaggaggaaagctggtcgaaataattattcttgacttacgaaatcattctttttattcctgaaggctaatgtgcgagcagcgccgggccgggctgtgctaatggcggacagcgtgggcctgcggagggcgcgcagcctcttctgtcctcctgtaatgagcagagcccccactcacagcccatcccactcttcatttaaaaggcaaatgaagcgtggagaggcactctctcggttaatgcagtcacaggtgtggttttaaacaggatttgtcctcaggagcactccctctgtcccgaagttcccgtctcagagcgcgcgctctccccaggtcagctccaggcaggtgtggggaggaagcccctccgcaaggggaaggagccgatggttaccgaggctctgccgtaggccaggcactgtgccacgcacgcgactcgcgagcacgcgttgaatccttgcaaacatcccgg

SEQ ID NO: 112 - DNA, 247 bp, Homo sapiens
tttctggcccagcgagagcgcccagggggtgggcgtcttgccccgggcgtcgagagtttggggccgtcccgtacgcggcgcgccgcaacccagtccccgcgaccacagcagcctgctccccaccgcgcttgcagagcccggacgcgcgtgagtcgggggcccgcagaggcctcacccttggaggtcgccgcttgtcaggcctgactgctgttggcgcccaccccgccgcccccgaggggccgctcga

SEQ ID NO: 113 - DNA, 307 bp, Homo sapiens
gccgggttccagctgcctacttcctttaaagccttcaccgactctaaaacaccaaaaacaaagacccaactagctccggaagcccgagatgtaaccgtagtcatctgaccctcccgtccggactctgattgggctttggagatacgcgtccctcccggcgctgtacggcgaccccgccccagcagcctgagggggcgggaacagatgtccgagtgcgacagtattggtcggcttccccaggaagcagccaatcggaataggcaagcttccggcgggaagtgagccagggcttggcgcggcggccgtg

SEQ ID NO: 114 - DNA, 460 bp, Homo sapiens
aacaggcacttaggtctccgtccctctagccatttctcaaccgtctcgaccggcgagttttcgttgaggcgagggagcgctcgctcccacaggttcgagggctgggcggagccttgggaaacgggccctggtaatctccgctcagtgagtggcgctgcgaagctgcttctgcccgggaaggaggagaggggcctggaaccgccgagggaaccaccagttccgacgccctggggtgggcccggaggaccgagtggctggggcggcacggggcggggggctgggcgggaggagcgggggtccaggaggtgacccaggagggggtaggatcgggctgggcctcgtgggctccctgcccccggagggggcgcgcagagggagggcggtagcccagtgagcgcgaccactacttccctgtgaacgcgagagctcagacaagccacagggggccagagccgagaaa

SEQ ID NO: 115 - DNA, 958 bp, Homo sapiens
ttaaaactttgctcccggagatcacaaaactaggaaatagggtgtgtgggagagacctgaatggccgaaacaaccgtaaagaaggtgtaagaagcgcgagcccaggagggaaaaagctgggccagggccgggacaaaggtttcccagggagggccaactcttccgtgtctctggcgggttttccttgttaaaggctcacaggttggagcctgttcgcggctcttggcctggtagggattttattagctctgctctggcaactgcaagccaggaacacaatgtcctgtgcaggggattgcccatgcagcccagctcgtgagatcgcgggatggcggggcagtgagccggtgccgctctgggagcctgagccagggcggcagtcctgtcggcctcggagagggaactgtaatctcgcaaccaggccgccgcgaggccttctgcctttgcaaagctgcgccccaccggcgccctcccaggcggcgctgccttccacattctctcctggtctacttggcctgtacctccacaacatcctccccccatccctcccagactccgtgctggctcctacccggactcgggcttccgtaaggttggtccacacagcgatttcttcgcgtgtggacatgtccgggtagcggttcctctggaaagtggcctccagctcctggagctgctggctggtaaagtgagtccgctgccgcctttgccgcttcttcttagacgggtcctcggcgcccacgtcctcattcttcccctgctggcttttatctttctctgaaaacgaaacacacacactttcccgtcagcatgcccacctgcaacgcggacgccaactggaccggcggcagaagccgtggaagagctgggctgcctggcgccggaggagggtgcgcgcggcggctccgggccgcgaggagcgctgcgcctgtggggtgtgcaggcgcaagtgtgggtg

SEQ ID NO: 116 - DNA, 158 bp, Homo sapiens
agtcgtaggtggctctgaaaagagcctttgctgttaggctgattttgtctgctgacagaaaaacagcagtgcatgaagcgttaactcttcactttcccttggccttatgatggctctcagttttcttaggcagcagcaccgcctgaatattaggcaaa

SEQ ID NO: 117 - DNA, 362 bp, Homo sapiens
gaacacccccacggccctccccccacagcaaggcaggtgtgtctgggggcctcggcgggtgccggggcgcggggcggatggtgccccccgggcgcaggccagggaggcccgagcgccttccccacgccccgctcgcccgcgcgtgtgaggggagggcggcccagccgtttcgcgccgggaggtaggtggtgctgttgccgtgactgtcttcctcattggcgccgtgcagagaggcggaatgttcaactcctaactgcagcggaaacgtgggagccgcgcgggccgctgtcgtcccaacccccgccgccctcgtcgcgcgcggggcctccgcgcccccggctgctgctcacgccccgcccggg

SEQ ID NO: 118 - DNA, 176 bp, Homo sapiens
ctcggccagggtttcccagaggcctggcgggcgaagtcagctgttccaggtcccggagagatggatcctcgcgtccaggagcccacattcttggggtgggtagggtgggagacaggtgtagagagaatctcagtacagcgtgatgccttcagtatccaagggagcaaccaggttgg

SEQ ID NO: 119 - DNA, 154 bp, Homo sapiens
cctcaaaaagtttttcttcttgggtttagagcccgatggatacaccctgggagaggcgacggggtggcccctgtgacttcgggctgcgacgcggtgtcgtccccacccccacccccctcactctagaagtcacagcgccatctactggacagcg

SEQ ID NO: 120 - DNA, 159 bp, Homo sapiens
ctcggtgccaagggcgccctgaaagccggagtgggggaagacggtgtcgggggaggtcgcctcgtccacgggcgggcgcgctatgacagcggcggggtttccaacggagactgcagcctcggcgtgtccggggacgaagcccgggctagccctaccagg

SEQ ID NO: 121 - DNA, 153 bp, Homo sapiens
gggcagggccaacgtaggaaatgaagaactgtgcacggcgcaccccaggaattcagcttcctctcaaaagccatggttgcgaggtcgcgtgtttaacctcgcactggctgctgagggaattaacaggcctgcgcagcagcttcgttagcttcg

SEQ ID NO: 122 - DNA, 226 bp, Homo sapiens
ctgcccactgaaggcagcctctaagcctccgaagctgagggcctgacacctccatccaagcctctgtgtgtgactgaggggggagaaacagagagaaaagaaccacttcctgcagagctggtggtggtggcggctctgagggaggagagacacccaccagaggtgaggactagaggctccttcagcaaatgtgaacgtgactcagggggccaccctgactgacagg

SEQ ID NO: 123 - DNA, 176 bp, Homo sapiens
ggcccgccctgggggcggggctgggccggtcgggcgcgcgggtcaggtggcgaagggcggagtctgcgcggggttgggcggagcctgcgcggggccggtaggatcgcgtcgggagccggtaccgaggcccgagccgcgggagtcgagcgaaggcagcgccgaggccgcggtttccc

SEQ ID NO: 124 - DNA, 140 bp, Homo sapiens
aaacttcaaggaggcctggccaggcggattcccgtggaccagagcagccgcgtgggagagcagagatcatgaagctgccgcgccccctgcaggccgtgggctagaagtgcatccgcctctgcactgggagtttttcttct

SEQ ID NO: 125 - DNA, 146 bp, Homo sapiens
gttgtcccagcaagaatcgggaggaaactgggtgaaaggctgcgaggcttgaggcgggtcccggacgaacgcggccctgcccctcgccggagcctctcgggagaagtgcgacaccgccgctgattgagaggctgaggcggaacttc

SEQ ID NO: 126 - DNA, 143 bp, Homo sapiens
aggagattccgccgggcaccgtctgccgcccgcctctgcgtgcaagcctggccgggacccaggcgcagctcgctcttcttgagtgtcttgtcttgctcactcagcccgcccgcgcggccgcccgaccccgcgcgcctaggtca

SEQ ID NO: 127 - DNA, 138 bp, Homo sapiens
ctgccaaagaactacctccaccaaagtcgcgtggaggttcccaggatgactccaccccggcgcgaaaacttccgaactcttcccgccaccaaaggttacctcgaggaagaggcggggaccttgggagcatataagcat

SEQ ID NO: 128 - DNA, 143 bp, Homo sapiens
gcagggacagcagagcacttgagcagccgggggctgaatcgctggccctgagctgccgggacacgccacctcccccagcacacagctctgcgcttctaccttctccagagcagaggtggggtgagtcatcccacccccgctcc

SEQ ID NO: 129 - DNA, 148 bp, Homo sapiens
cccaaattaaaagaggaaattattgtcctgatgctcaactcgcctaatccccatctgtctcctctctggtcccccgcgctgccgagcgctcgcatctaaaggtcttgaacgcgttccaggtttctaatttcgtttgcttatgcaacca

SEQ ID NO: 130 - DNA, 144 bp, Homo sapiens
atttgcgcaggcgcagatcctaactttggcgtccctgtgggcggcctttggtgtgagacgcgtggtattctgggaacgtcggagacggaagttacttcgtctttagctcctggcgctgctggcttctgggcggtttttgtcttt

SEQ ID NO: 131 - DNA, 302 bp, Homo sapiens
gccagccggaagttccgcctacttcccctacctctgtcaatccgaccacgacttctccttgaaaaccacgactcctgacacagtagttccgcctcctcagaggcccccgggatgaagtgacccagcagaaataccagagaccggagacggaatggcccagggtcagcctccacccggaaccggaggatgcagcgaagacgtctccttgaagtgggatacggatgtgaaccggcccaagtgctcgccggtccgtcaagacgcgctgcccggctgctcccgtgtccaactcgggctgtgtccgc

SEQ ID NO: 132 - DNA, 140 bp, Homo sapiens
cacggcgttcacccccatgccggggggcgcggcgggtcctccacggagaaattcaaggaaggaggctccggctcatagccgacaccttcgcttccaagagaattgcctcacccggggcgtgaggaaagggcggcagaggg

SEQ ID NO: 133 - DNA, 306 bp, Homo sapiens
agccccattcattgatgggctggggccgtgcgctgagcgcccacagtcgatggggaaaggggctctgaccgacagtccccacgccgggcgacaagtgctgtcccagcgttatcagtcgggcgccttgccagccgaaagggcctgtctaaattcgtttcctgtcccctaactcatcccggcgctggctggcctggagagggtaggatggggcggcgccgagaatggccgttatgaggaccctaagaggtgagaccctctcgccttctggggtggggggtcccgtcctttcccccactgaggacagag

SEQ ID NO: 134 - DNA, 169 bp, Homo sapiens
ctccgcgatctccctccggcctcttccctcggtgtcccggctcctctggcaactgggcgggaccgcgagcgtctagaccgcagcgctaaaatgcgctcagccaatccggcagctggcgcagacacgtggttcgggggcgcgctccgttgctggccctggatgctaaccc

SEQ ID NO: 135 - DNA, 146 bp, Homo sapiens
ggtcgcctactcggccttcgcggctcaccccttcctgtacgggctgctgcagcgccccgtgcgcttggcactgggccgcctctctcgccgtgcactgcctggacctgtgcgggcctgcactccgcaagcctggcacccgcgggcac

SEQ ID NO: 136 - DNA, 166 bp, Homo sapiens
cagccgccgccaccgctaccgcagccgccgccgccgccgccgcccaggtgactgaggagagaggcacctcctcgctcccgccgccgccggacttcaatgcccagtccccagctcgccagcgtttttcgttggaatatacgttgcacatttatggcgattctgaatg

SEQ ID NO: 137 - DNA, 160 bp, Homo sapiens
gcgggccgggccgggccggcagccgccctgctgcgtcgctggtggtcgggagacggagaagaacgggtgtcgcgggcgaaggagttcccaggacaccccctcgggtgtctgcgccggaactccgagggttccccggagttagaccgagtccttcctcacg

SEQ ID NO: 138 - DNA, 147 bp, Homo sapiens
tttccactgtgccaatacccagtgggggattccctggtgtgagcgcctggggataacgggggtgtcttctagtctgcatttacagtgaggaactcggctacgccagggtgtggccatgggcccccgctcccaggcactgtgcagtga

SEQ ID NO: 139 - DNA, 140 bp, Homo sapiens
cactgctcagggcccgcgtgacattgcacaggtttagaaacgcacagcgggaaggtggccccggcgggccgagggcgcaggatccctgctccgtccagggtccgtcctgcgaggaggcgccgggggcgggcccggggcgg

SEQ ID NO: 140 - DNA, 166 bp, Homo sapiens
gcggcccagcacgcgcaggccacccagagtggaggtgggaaacggcattacgcccctttcccttttcctggtcccgcggtgctacctcgtgtgccacccttaaagcgtagtccccgccgagaccgcccccgcctgagtggcaaggggacgaactgcgccctgaaca

SEQ ID NO: 141 - DNA, 144 bp, Homo sapiens
aataaggacttgataagtgtattatgagataaccactgaatgaatttgcacaatagacgtgcgtgcccttcatctgccgcgtcatttacttgctttcaaaggactttattattcacctgcccattcattttcacttagtcccac

SEQ ID NO: 142 - DNA, 171 bp, Homo sapiens
cggagaaccgggaaaagggcggagaaccgggaaaaggtcaagacctgtacgtacctctcgcgcaggctcgggttgcgttctggtaggacgtacgtgtttctgagcgcttggtggaaagatttaaatggggggaagagaagatgaaaagcaggaaagagttggcaaatacta

SEQ ID NO: 143 - DNA, 157 bp, Homo sapiens
ctctccggcccgggaaccgggggacgtaagcgccaggacccgcagcggcggcggcgggggcaggagcgccaccaccgccatgccgcccccggtgcccaacggcaacctccaccagcacgacccccaggacctcaggcacaatggcaacgtggtggtg

SEQ ID NO: 144 - DNA, 179 bp, Homo sapiens
ctttctttcgcaagaggggaaaatatcctcacagactttctgtgttctcagagacgatcttcttccctagaaagaagtcgcttacggttggcgtttccctcaggcagcgccgtgggcagcccacaggcccttgtaaggcgcgcgccgcggccccgcctctttcctttcggccggaaccg

SEQ ID NO: 145 - DNA, 450 bp, Homo sapiens
cgcactcgtcgcccggccgccactcgggcccggcggaggggcgggcggcgccgcgtgaggcccggcggattgggccggctgccgtccatctggccgtgagagcccttcgattggctcatctcgccaagggaggcgggcatcccttccggcctcggggcggggtcgacgccgaaagaggcgggatctttgaggtgaaggcgcttctcattggacgcccaggctgaggttctttctttcagaatgaaagggaggcggggtcgcccgggaggcggagcgatcgtccgccatggccaattataattgctctgagtggacatcagacgtgcccaacgggctttggattgggtgttcgggggacggggcgtgacgagaagtgccaggtgtacagaaagattctcccttggttcccagattgggtccgcctgtgagaccaggacctcgcggagtagc

SEQ ID NO: 146 - DNA, 252 bp, Homo sapiens
ggcgcccctggccggaagacacaaatgacccgagaagttgcgaggctccccggtggcggggacggggggcaccccgacggagccctcggacccttcccgccctaggacgaccctgcccgcaccgagccccggcccagctgccgcgccctagcccacgccggcgcctgcgcacctaccatgcggcccgcggcccgcgagaccccggcttccaccctccgagcgacggacacagacgcggcgcgggagccagtg

SEQ ID NO: 147 - DNA, 325 bp, Homo sapiens
cccatggtctgcaagaagagaagccctttaaggtctgggtcgccgggacaccccgctagggccccgccccggctctgccctcacctctcgcagccagacccgcgggtctcccggaacccacctcggcgtcgggaggagctggcgccgtgacgccaccaccgcgtaccgacctcaccctccgtgcgttggagcggaaagaagggactcgaccctgtgcttcggggcggggctccgcgaccgtcccccgccaatcccgccccagcgcctcaaggccccgccccgcgcaaggggacggaatgcaccccaacagcctccaagacgccca

SEQ ID NO: 148 - DNA, 379 bp, Homo sapiens
gtgtgccaaaacttctgtcacgaacgaggccatggccaagacgggaaccaacgctgactgggtcactctcgtagccagcgccgcagctcccgtcccgccggccgtcttgacgcgaggcctgccgggaaacggagtctcgcgggcctcagaccgccgcccggaaggcgaggggcgcactacaactcccagcaggcaccgcgccaatcccgagatgggatttccacggtgtcccgtagttggcaaactgtaagcagacgcgttttcttccttagttgttttcaaagttcgttgcttcccgcccgtttttcactggaggaaattaaacgtttttaataaccaggtctaactgaacctttctaaacttcaaaaggcttacttg

SEQ ID NO: 149 - DNA, 147 bp, Homo sapiens
ctttgccgttgggtacagagtttgaggtgattcgggaaaggagtgtgatgagggaggctggcgccccggctttccgcagcctgcagcctccccgagagcaagtcgagagtgccccggcagcagctgggcttcgcgctcgggagctga

SEQ ID NO: 150 - DNA, 148 bp, Homo sapiens
gcagcgcttgctcccgccgccgtcaccgccacaggcacagactctgccacagccgccgccgccgctgccgccgcccggtcgccgaagcagcaatacctcctggcttccgctccccgtcggtgtcccgcgagaacttctccacgaggcc

SEQ ID NO: 151 - DNA, 134 bp, Homo sapiens
cgctgagttggccacggacggggactcagataccgatgaagaggcgcgcctggcgctgcgcgccgagccgccggagctcaccttccgccagttccacgcgcgcctctgtggctacttcggcacccgtgcggggc

SEQ ID NO: 152 - DNA, 321 bp, Homo sapiens
gccgccgccgccgctccacagacgtcacatgatgtttggtcacgtgggctccattcatgaagcggcgacgcggccggccggcgcttaaaggggaaggcgcggcggcgggagggcaaactgcgcatgcgcaacccgcgcgccgtcgtccctggcaacactggctgctctagcgcctggcggggtctcacgggcgggcctgggcgcacggccaaagcgccaggtctccacccccagcccccggcgtcctgcagccggagcctgcctcgcctggctcctgcgcccgccgtccagggcccctgtccaagctcgcggacgccggcg

SEQ ID NO: 153 - DNA, 173 bp, Homo sapiens
ggctcccggggtggctagtgctttgattggcagagcacagaaatccggcggcggggggccacggaaagactcgggcccagggaccacggagggggcacctggcgcggagcccccaccctacccccggctagcttgcgtgcgccggcgacatccctctagggggcagaggtcag

SEQ ID NO: 154 - DNA, 138 bp, Homo sapiens
ggatgggcgccgccgcctggggcataggacctacgggcaactgagggacccactcacgtgcagccgccattcgcgccgcttccagggcaagcacccagtcagggcctctcgctgcgcgccctagaccgcgcccgcccc

SEQ ID NO: 155 - DNA, 230 bp, Homo sapiens
cccaggtagcttctggggagtccgaggggcaaggaggccaaatcctttggaagcccggacaaggagtgggtacctggggctacaggaaagggaggagatggcagtggcatgcacccgcagtcagtcaaagccaccgggctcaagtcttcctcttttgcgcagcaccggtaaggagagagggtgtctatgcatcacgttggcctgggtgccatttccccaattaccccttg

SEQ ID NO: 156 - DNA, 141 bp, Homo sapiens
cggggcgggaccggccggagctgggaccccaggagacgagcgctgcacccggccgggacgcgtcgcccctccgcgcctgtttatcccggctcggattaccgcgcagggagccgccccctcccgcggtccgcgaggactggc

SEQ ID NO: 157 - DNA, 139 bp, Homo sapiens
atcaccacagaagcggctgccaggccttcggcgggaggctggccctcttcctgcccggctttgatcgccacatgaccgcgacccccaacaactcggatctggggagtaccgccacggcccgcggcatcctggggtacgc

SEQ ID NO: 158 - DNA, 165 bp, Homo sapiens
actcgctctcgttctgcctcgcgcagctcgcggcggcggccggggaggctctgggtggggaaaaggacccagcgaccaacgagacacccctgagccgcgcgctcctagccctccgcacgcgccacatcaaggcagcggggggaatcgagcgcttccgggcacgcg

SEQ ID NO: 159 - DNA, 154 bp, Homo sapiens
gctgacacgctgcagtgaagaagcgggagggctggccacagaaggcggcacgctccgagtggagcaggtgagcggcgcgcactgaagcaagcatcacgcaattgaaccgctcacccacgtgttcccccccaccatcctccttcccagacggcgc

SEQ ID NO: 160 - DNA, 146 bp, Homo sapiens
cctcgcggcagcgcactcgcgtgagactcgggtgggcggtgctccgcagcgtgggcctatgggaaatgcagtcccggcgcgcgctaggcggccgtggggcggcggtgggaggctctgggagtgcagccggcgctgcgcgcccgccc

SEQ ID NO: 161 - DNA, 524 bp, Homo sapiens
caccttgctcaatggttgccttagaaaccggcctagcgagggggtgtcagttgtctctggtagccattaaggcagtgactcagcagaaaacccaacccaagagggagttgttcattcactgactttccttctctcccagaaaagcatgggtgaggccatttctgttacatttgcgatcgggtggcagctgctccgccgtgaaggcggtagcgagaagtctgcccgctcctccagcctctcactaggtgagtggcgtctctgtgctgccctgtccctcagaaaccacaggttccggtccctctgccagcctgtcccctgtctctcccctcccgctgacagggtgaaaccagcttccgctcacaagcacttgctgggggttgccacaggcatggctcttggggagatctttagtaaaaaacccaaccaaacatcacgagtggaaccgagtgtggatcataaactcaactgagagaaaagccaagggacgcatgtgggcaaaatacacagaaaacccagcatgggcg

SEQ ID NO: 162 - DNA, 346 bp, Homo sapiens
ctagctcaacagtcttgacttttcagggccgtgacccagaagggaggtgcccgtgcagaaggcagaacaggaagaggttcttagcacccactgttttctcttcctgcacagccgccttgggcagctgcctgtgaacagcctggctgtttttctcctagctctctcggaaggaagtgctctcatcacccacgacaacagagttggcccgaggagccaaaaacgtgcaaaggggctccaagcccagctctccttctgttcggggcagcctcagagacaggaagatgggaagaaagtatggcctgggatagaacatcctgcgagacccttacaaagccccagctgtggg

SEQ ID NO: 163 - DNA, 211 bp, Homo sapiens
ctgattttatctacatcaaaggctccaaaccggaaaacacaaatattaactagaaagcattatataacattttatttaccgtcttttccggtagacggtaagctccacaagggcggggctcaataaacgtttacgagtggcttaaatgaaaggacgtgcgtgggcacaccgcggggactaatcgtgttaggcccttctccaaggcctatga

SEQ ID NO: 164 - DNA, 145 bp, Homo sapiens
cctttgggccgaagctttaagaaaacaggggcagcgagcccggcgtcccaaggagccttgccaaactgggcatggagaacgggcctcctggatggccacccgcccagctgccaaagaggccggagagctggagccgggacttgga

SEQ ID NO: 165 - DNA, 170 bp, Homo sapiens
gttcgggtctagcggaatggctgggctccgagaagggcgccgggcccacgggcgggacggccagggcggccccgcaccctctgggcgcaaatttctccagcggggtccccagcgcggccagccccagtctcgcgagaggacgtgggtcccgcccggcgcccgaccccgcc

SEQ ID NO: 166 - DNA, 147 bp, Homo sapiens
aagagaagcttgacactcctggccccaaacactgcctggctacaacacgatatccagggacagataccttccatgtacagcaagctgtggagtggcaagaaagcaaagcacgtaccaaaagcaggcaggaagcagaactggctggta

SEQ ID NO: 167 - DNA, 146 bp, Homo sapiens
tgagcccgaggagcgggggccgcgcccggaagggctcatgggagggtgccggggctggccccgagcgctggggacgcggcgggagggaccgggtccgccgtgccccggggaggctgctgctgcccggcggcgggaggcatgcagcc

SEQ ID NO: 168 - DNA, 159 bp, Homo sapiens
ctgtggcgcgccccccgccggatcaaggtactggggatgccgctagggtcaggcccgcgagcgcggagaagacagagcgcggcgcaaaagggaaagtggcggggccgccacgcgcggccgggcggcggatgtgcgcaggcgcagcctcgcgtagcgctc

SEQ ID NO: 169 - DNA, 160 bp, Homo sapiens
atttctgctctcgagcggagggttttgccttagtcccgtgcgtaaccctccgcctcaccctcctcaaatagtcctcaggcgtgcctagaaatggtccccgcttcgctttattctcaaggaggtgggaggaggttggagtttgttttgtgtcttctgcaca

SEQ ID NO: 170 - DNA, 317 bp, Homo sapiens
cggccgccggcgcgtccgcggccaccggcgtttgtctttgcgctggcgagggcgggcgtctgcaacgcctctgatgggcggccgggcggccacggggagaaaaggctgccagcaatgggagcagtgcctgcagagcacgcctccgaccagaggccggatccagaataaagaaggagcctcagactctgccgcaaagacggccgggttcacaggagcccagggcttgaccttcagacgtttgtctgaagaagacacactcgcggccagtgagcagatgaagaggtgaaagcaaaccagggccccacggccgctgcacc

SEQ ID NO: 171 - DNA, 159 bp, Homo sapiens
agctcctcaggggggcggcctagatagtccgtgaacacgctgagtggccgaggttgtaaccagcgccttcctggcacgttgcagaaaacaacctctctaatatctctcaaaatcaaacctacaggtccagtgagccaggtgcttgtagagatttatcca

SEQ ID NO: 172 - DNA, 177 bp, Homo sapiens
gaagcccgggcaggacgcagccgcgcttcacagctgaggaaaacccgctgcggcgtagggcaacgctcagaagccgagagtggcaccgcgacgcgccggaacgcgtcagcatccttcacacctaagaccagacttcctcctcctcacccaggacgctccccgccgctcgtccggtcg

SEQ ID NO: 173 - DNA, 1736 bp, Homo sapiens
ccatttttctaaaagaaacaataatttttttttccttcattttctccgcgcctctctaatctgccaggaaataattcaacgcaattcgggctgaagcgtgtgcctcgccgcctgcggttgggtcatggccccttctgagactgctcggaagtgggagaggatgcttgcccttacgggtgttctgcccctgagactggcgccccttggtgctccctctgttccctcccagatcttgggagaagcacggacatctctgtttctgcttttggtccccgaacgcagttacgcgcccactggctccctgtctctggcgcttctgggcacgggggagctggggcggccccgcctgcgcacggcggtgccgggattgggggcgggcacgccgcctccgtctcccacgcgctcgctcgctcgctcgctcccgccctccccgcctcgagcgatctcctgcctcagccttgcaggctccgcactgcagatgcctgctggcttccctgcgctcggcggctcccgcggtgccccgtaagtccccgtgaccctccagcaccagccggctgtgcgctccctgctcccacgggccggtcagccgcagacactcacccagctccgcgagctcagccgctcagcgagtggggtagcggggaccgagacggacggtagccgtgccagagcccggggcgctctcggatgcggcaggacaagctgaccgggtctctgaggcgcggggggagatgcctgaagcggcagggcggcggcgtgggcaccatcctgagcaatgtgctcaagaagcgcagctgcatttcccggaccgcgccccggctgctgtgcaccctggagccgggtgaggaccccagggctgcagatggggcgctgtaaagtagcgccggggctgcccgcgcttctgccttagcctgactccgtctaggccggggagctctggggaaagtccgcgtgccacctggtgcggggcaccgcgttggcacctgcagggagcgattggtctggaagggtagagggcagacgggggcctgggtggggcagcggccaccccaggcgcggagaacccgctgcttccaccctctccccgcggacccccaccctgcggcctgtgtgctcggctttctccgcgtggcggggaagtgcgggtggctgcccgggccctcagaggccgcaccacctattgtgttccaggctcgcaggaagccagaccttgcgagaggtgtgtgggggcggagagtggcacaggtttgacactgcaggtcggaggaggaagacagtggctgcaaaggcaaaatcgggtgttattttcccaagagtcccttcagcgtgagtgccggggtcagctcgaactggagcctgtaatttgtgagtgcgagtggggagcagcaggagatccttttcataggtgaggtccaggaacgagcctggtcgtgctaggcaaggcccttcccactgtcagcctgtgtttacccatccctgcttctccagactgcataactccgtgtcggctccatcacccggcatccctccccgggattttaagagcctggccctagcgcgggctcctgggcacggaggtttctggcaaggagtggctgcagagggagttggctgtactctcactggtgcttggcgctcacctgttccctggagtggcaccggctgcgttccaggcgggttcacggtccccggcccccgccccccagcgccagcgccttggggacctgctgtagagc

SEQ ID NO: 174 - DNA, 146 bp, Homo sapiens
tcctataggccaggccgccccctagtttctgcgctgtgggctaaactccagaagctggcgcccttcagggccagaggtttcctgtgctctctggaggctgctaggattaaaggcaaagcaaacgacaggtctattagccacagttg

SEQ ID NO: 175 - DNA, 127 bp, Homo sapiens
cccatccggataccccagccgcgtcctctagcctcacaggacccgcctgcacctcttctggtttcttccctcgtggctcgggctcacccctggctcgtcaaacctcgcccgttgtccccgagacccc

SEQ ID NO: 176 - DNA, 138 bp, Homo sapiens
gcgcactcccctccgggaccccgggaccgcgcgctgcaccccccttcacacacgcaccacgcatgcgggcgcgtggccccgcccccaaacaaggccacgcggcgtgcgctcacccgcctctcggggacagtaccacca

SEQ ID NO: 177 - DNA, 173 bp, Homo sapiens
gcgctaggggaggggcgcgcccacggttgtcccgggagacgcggaggacgcgcgcaccgcgcacccgggcgccaggggctggaccgccgctcgctcccgcagccctacccttgcccagcgagccaagccgcagtcccagcccatccgcgccggtgccgtcgggcgccgtgcgc

SEQ ID NO: 178 - DNA, 157 bp, Homo sapiens
gtctccaattcctggcctcaagcggtcctcccggctcggactcccaaagagctgggatcacagacgtgaaccacgcgcccggccacattccccaattaatggtttttggagagtggccggtttggaacgggctagcggagtcgttcgttagttaggt

SEQ ID NO: 179 - DNA, 152 bp, Homo sapiens
tgcgcctggcctgcaggcgggcggccggcacggagctcggggctagcgtgggaccgtgcggtggccagggtcgccagggcgcgtgtgccggggaagaatagccgcggatcgcagggccccggcgcagggacgggggaggccgcgatcggccg

SEQ ID NO: 180 - DNA, 132 bp, Homo sapiens
taccctctggctagccttcctgcggcaaccgcggccaagtttacacagaaacccgagtcacctcctcccgcccagcccccagccccaaacgaactcttccgggctgtcccggggcgaccctaccaactccca

SEQ ID NO: 181 - DNA, 3267 bp, Homo sapiens
gagtctcaagggtggtggtcttaagtccgaagtgctgacagcctcactcaactgtggggaggaggcagagagggagggtggagacagagacccagaccccgagaaacaagtgtggctccagcccaggagcctcacagaacacatttcctcctccgccttcggctctgcgtgggctagccccgcgctagggagggcaggcaactaggtcctccgaggtgaggctggggctccgcctgcagagggagtgacagcgcgccgcgagggtccgcgacccaggcaggggtggccgcaccaccccggagcgccgcacagccccgcaggcctcccctcccgcagtgcgtgcctggaacgcggggccgcctggccgagggacgtttacctggagagctttgtgtccacaacactaatccttagacactgcttcgttcagcagctgccgtcagtcgtgagggcactagtgtggggatgggggcgaattcaggagcccgtcgcagagcaatatttaaaaaggggggggggagccggagctgctcccaggggaggcctcgcgcggcggcgcccacggccacggtgtccccgctgcgagccaacaaagctgaggcgctgtccgcgggaggagagagcccagcgcggggaccggcgcgggtgggagtgggggcgcggcgcggaaaaccccagggaaggaccgggtggacacgggacgggaggggggtgacatcctcccacccgggggttagaaaaggtccgggtggtagttccaggcgaaaataggcagccctctgtgatgacagaattgacaactattttttgggggggcgggggttggacttccgagtccctcgggacggaggcgcaggggagcaggaggggtgccccgtccctgcagttgcctcggcccgaatcccgcaggccaggccggaacgcgggggcgggggcgcgggagggggacccgcggcgggaggcgagagcgagcgaatggggagaggagcggggagcaggaggggacgcaggggagaggggactggggagcggcgagaggaggacgggagacgcggctccacctcccagctcaaaacggcgtcccagctgctcgcaaaccaactgctcgattctattcactgtcgagtaggaacaaaaaagtggctatttattagaatacttgtttggtattgttccgcgccacacaaaaggcgtttcattatgtggagggatctcctttttccagagagaaacaataacttgaaattgtctttaaagtcttttctatcaataataaatttcattttcttgtctctctcgcctgcagtgtgtgtgcgcgcgcgcgaggcgaggagagaggcgcgtgtgcgagtgagtgtgctagcgggggtgcgcgtgtgagtgtgcgcgtgtgtgtgcgtgcgcgtggcaccggcgcccgcggctacggggctggcgctgccggagccgggccggaccggggtccgagatctgcgtcgcgctgggcacgctggccacccggtccggaatgagtcggggctccgggaggtgcccgtgggcagagcgttaggggcgcggccgtgccggacccgccctggggacccgctggagctggaggaggaactaactgtaagtgtgtctcgaacttgcgcgggggcttcagcccgcccggggctgcggagctggccggtaaaggctctcgggagaggggcgcggtgtctccacggtgactttccgtgaaggaggatggggtgtctccgcagctttggggccccaggaaagaacaggtgggtagatgtggtggccacggctagcggactcgccgcggggcacatttgtcattttcttatctgtgcgttcactcctcccccatcctcggcttttgggattggccgccgcccaacggacccagactgtttctctctgggtcgccatttttggggaggggggagggaggtcgagtctgtggatttgggggagaggttcttgtccgccacagctccgcgccccctccccgcccctcgcggctcccccaccctcgcgttcggcagcgccaggctgcgctctccccggtgcacacccggccgcgccgagaactaaatccgcgggctgaaattacgttttaaaaattaacatgttgaagcgtgtgccatttagtgagaggtgttttgggcaaagaatcaatttaactgtgactgaccgacgggcttgactgtattaattctgctaccgaaaaaaaaaaaaaaaaaaaagcaatgagccgcaagccttggactcgcagagctgccggtgcccgtccgagagccccaccagcgcggctcacgcctcagtctcgccgccccaaggtgggatccgacgcccaaaggagggcgccccaaggtgggatccgagcgggccgccctaggaggagtgaaccccgcccgggcgcacagctccgtgcgcctgtcctccctcctccagcgaaatcacacccgctttgcctcctcttgcagcaccgcgcgtgcctaggttctcggtctgcgcagctgggagtctcccccaccagcgccgcggagccgcccgcttccgctccctctttccgcgggtttgagcctcccgtggagaggaaaggtcacgaagtttcaaaggtgaaatggattttcggcggtggctggtgcgggagtcaatgggcagggcggggcaagcctggcagtcatcgacccgagcagggacccggctggccgcctccccttgcaggaaacaggtgtttgaacgcgatagcggccgccagtcaactaaggcattaaaagctcgctttataacatcgatttcctggagtgcggtggggcctgcgttctggaagctcgtttgtgaaaggcggggttgggggaattgccctgatggtaccccagttggcgcagaagatccccaaaagtccctgtcaccgcagcggcggacagcggggctgcccaggcggctgggagggcagcttttccctcccgctggggtggaaagaggagtcctgctccgttccccacccaggacaatggtcttgttaccccggcctcctcccctgcacctagggcctggcatgcagagagcgcccgcagcagagggggaagtctccaacaactggcaggtgtcccccgaggagctccgcttgatttggaagggtggttaaaccgggatccaggaggaaagcaattccgttgccacccacatcccctgggccctaccaggcttcttcccctgctagcacatctcccggatgcgacgcaggccaggtggcagggctgaagcaggcaggca

SEQ ID NO: 182 - DNA, 247 bp, Homo sapiens
gcccgagctgagatcagttccctcaggcgactcgtcctgcgcatgcgctgagggctggagctcgagaactgaatgcgctcgccgggctgagcgtgcgtggatggaggcggtcggcttcagcacgcatgcgggttccggagcgggaggcgggaggacgccgcggctctgactcaatgcgcgtgcgcgcggttggggggttgagggtggggagatgagtagggaaatggatacgccgaggagccggcag

SEQ ID NO: 183 - DNA, 279 bp, Homo sapiens
gcgctggctaaagtgcgcaagcgcgcgaggctcgggcctttcaaaccccggcgcgccggcgccggcgtcgacactgcgcaagcccagtcgcgcctctccagagcgggaagagcgctgcgttccttagcaacgagcgtttcctccagccccgcctccctccgccacacacaaccccgctctagcctcgcctcccaatgacgtccgaaccctgctttctgggagcctagcaacagaagcgacctccgggattggtgtctggaagaaattcgcctttctcat

SEQ ID NO: 184 - DNA, 307 bp, Homo sapiens
tccagcctcgccatcacacacaaggaaaccgaagctcggaggtcgagcagctcggcgtactaaggggagcaagggcagaatggggactggaatccaggtctgcaggtcaaaggctgttctcacccacccccatccccagggaagcgtgtgcactcgcaacagggctgggggcaggtcacagatctcactgggcaggggcgggaggtagttctgagtctggcatattcttctaactggcaggaaacagacagctaggcattttgcgaaggaacagagagacgtgaatctaagactcaagatcagagaa

SEQ ID NO: 185 - DNA, 141 bp, Homo sapiens
ctgaagggcaacgtcagccggcgcctcggccggggcccgggcaccgccgcgggagcaggcgcggctccgcacggcgggcgcactcacctcctccgtggaccggccgctccgccgccggctgtcactgcagcccactccctg

SEQ ID NO: 186 - DNA, 474 bp, Homo sapiens
ttcttaaattctccagtcacgtctgaaaaaaaaaagttttaatggaggactttgtagtaaagaaaagcatggtaaccttgataatttactgaaaggaaaggccaatcaactcgatgttaccaaagctgaaacagaaaaatttaattctcccttaacgaaggaagccaacgcagcacacaggtttccgtggtgtagtggttatcacattcgccttacacgcgaaaggtcctcgggtcgaaaccgagcggaaacaacttgcaatttttcggggtgtttctgttttccaagattcccttagctgaccttgacagtggacgtctttacaatggcaccatcgcacgatctctcgatcactctcagctttcaaaagcagaatactgttctattaggtgtttctctctgcatgttgtcggcagtgttctgaataggaggagatccctgcctttaaagggggcgagattggggtggaggggt

SEQ ID NO: 187 - DNA, 202 bp, Homo sapiens
ggccgtttcgcgccaacagaatcagcttcgtctctgccttttctactttggtttagtggtttagtggtttgtggggaaagagccccgctgctaacataaggtgaaaggcatctgtctgccaaaatgaggaatccgaggcccagaaagaggaggccctggctgagctcggtcgccacagcggtgtgaacaggtgccctgactt

SEQ ID NO: 188 - DNA, 323 bp, Homo sapiens
gacgctcaagtcttaccgggaggctctcctagagagcagcgcgaagccatggcttttgggcccggggacggaccgtagcgcgtagccggaagcggaggcgtggaggcgggtctgaggtttggtgactgcggggcaggccgggggcagctgtctgtctggctctttttgacagcccccagtgcgaaaggctgccagcatgtcatcagtgagccccatccagatccccagtcgcctcccgctgctgctcacccacgagggcgtcctgctgcccggctccaccatgcgcaccagcgtggactcggcccgcaacctgcagctggtgc

SEQ ID NO: 189 - DNA, 138 bp, Homo sapiens
agggtctggctggaaccgattggaagtggctgtggcgggcctcgggccttcccgcagtcggctccgagatccgcggcccgagttctccttggcgcagctcggccctcagtctccttcagccataagatggcggctggg

SEQ ID NO: 190 - DNA, 147 bp, Homo sapiens
tttcaagtccctctgctgaccgcacaaagactcccgtggccccggcagcagctcggccttctctacatctaaccacgtttactaaatttctacggcacgcagcgcaccgcaccaggagctgggagcggctcgcggtacagacctcct

SEQ ID NO: 191 - DNA, 148 bp, Homo sapiens
gggcagcaggggaggaccgtgttgggtttgaatctgccctctgccactaactagcttgacactcagtcccccttaacgtcagtttctcacctgtgcatttcctgtggagagaaactgagagcacataaatgtccaggcgcactcagta

SEQ ID NO: 192 - DNA, 143 bp, Homo sapiens
ctcctgctctccagcgcccaggactgtctctatctcagcctgtgctcccttctctctttgctgcgcccaagggcaccgcttccgccactctccggggggtccccaggcgattcctgatgccccctccttgatcccgtttccgc

SEQ ID NO: 193 - DNA, 595 bp, Homo sapiens
ttgtgtgttagcaggtttctctggcgttaccccagaagctcctagaaaagcctgcccggcagcaagccacaggccccgccacgccattggccaggattgagtcacgtgccctccccagagccaatgggagcgagggggcagggtgaccgggaatgaccttagactgcccgccctgcgcggagggagatccactacaggctgcgcctctgcccctgcgaggggcacccctgggtctctgggaaacggaatggagggtcttatggaagagaaggtttggaaccaccgctggagggaaggggagaagaaagcaagcaggagtggcgcgaacaggaagggactagggatagaagccgggcttggacacagtgaggcacgaaccccgacagacacagagacagacaaggggtgctgatctcctcactgggcggggtgggcaggaaaaggaacaggagctggagctagagcgagggctgcgagcggcgagtggatacccggcctcagggaggagcttccaggagggcaggggtctcctttggagcagcaccggggacgtttgctcggcaagggctttttgtgcgaagtaaccgaagccagt

SEQ ID NO: 194 - DNA, 150 bp, Homo sapiens
cgctggagctggccgaagcacggcggcggctgctggaggtggagggccgccggcgcctggtgtcggagctggagagccgcgtgctgcagctgcaccgcgttttcttggcggccgagctgcgcctggcgcaccgcgcggagagcctgagcc

SEQ ID NO: 195 - DNA, 141 bp, Homo sapiens
gaagccccgggcagcgtggccgcggtcggcagtggagaaactcaaccgcgacaccggcgccctccttgccgccctccccgcctccagggcgctcggacactcttttgcaaaccccgggactttcccgacctgaaaggcagg

SEQ ID NO: 196 - DNA, 146 bp, Homo sapiens
accagagtcaagcagcaaaaatgctaggccttgtgggcggggccggggtgcccgctcttgccactggtccaatcacagcgcggcgttcctcctggccggccgccgattggtggttgccatagctccgggcgttcgcttgcaagatg

SEQ ID NO: 197 - DNA, 148 bp, Homo sapiens
gcgctgtcgctgccctctccgctgcccgcccgggccggcgcgctgctgccctctgcctccatcctggctcgcggctccgcgacctgctgcccagcccgggttcaccgcgctggcccgagcgccttcctgatgctgctgctgctgctgc

SEQ ID NO: 198 - DNA, 154 bp, Homo sapiens
ctagccgcgtcgccctcccacagctcccgcttccctcacaagtcttaccgaggcccagttggcggctttccggaggcggcgccccctcgcctaggaaaaggatttgcagggtgcccggctccagggcaggaatagcgcggggagaattctgacc

SEQ ID NO: 199 - DNA, 431 bp, Homo sapiens
ataaaattagcacaaaattaacaaaacgcttgcctgaagaaaagaaccgagaatccagggtttccccaattgggccccagtgcaagcctggttctacggagaggatgtgcatgccccgggccgcctctgagaagcccgagaccagtgcactcctctttgactctgcaaccgcccagggagggcacgaaagtgggtcgcaaatcatggctctgctcctccaggcagggacagaatccaagggcccaagagagtcactcccgaagaccagagagagacaactgcccaatgtctagtccagttcccagggaactgtcacagaagcagcggctccccttctctctggggttcgcgagcggggcagggcatcccctccgagtctccggagttggcgggcgctgttgcccacgctccagtggccgagcagaacggag

SEQ ID NO: 200 - DNA, 141 bp, Homo sapiens
atcagtgagtcaatgaaccgtgaagggtgggggttaatcagggtgttctccaaacaaaggctcatgagagcggcagggacgccactcccagactcacatctgtgctgttttgagtgcagcatgatggaaatggcatggtgt

SEQ ID NO: 201 - DNA, 215 bp, Homo sapiens
ccgcggtgggaaagcctaaaacaatacacatatgttttcactaatttaaaattcatattgaagcgggacgttttagaacttccaggacgcaacgtgctattaagggaccgtgaggggcgggcagcccttctgagatcgcgggctaactgctactttcacccctccttctccggacccctctctccgtctacagctcgcgccagggacccaaacag

SEQ ID NO: 202 - DNA, 179 bp, Homo sapiens
ggctccagagtccaaataaccccgccaaactcccagggatcgccagaccttgcgggttatcggactgagacccacccatgcagaggacttttatgggcatttcctggtcctttctgcaccaggcaggaaggtgcaccgccactgctcgggaagaatgctaagctgcatgccaccccagg

SEQ ID NO: 203 - DNA, 775 bp, Homo sapiens
tttgcttatggttctgaggtgtcttttcgaaaatgggttttctagtcaaaatgaaacaaaaaggcagacagctgtgtggattttcccttcagagtaagccaagtgacggaaaggcctgcccgccccgctggggacaacagcgccagcacccgcgccgtcgggtcgggtaggctggggaggtagcgcaggcggcctggcccccagaccaccccgcgcccctggcggcctggccccagcccaccccgcgcccccggcggcggcccccgccctagcgcccggtacttgcctgcaggcgagcgccaccacagtcagcccgcggcttttctgtcttcctttctggcccagcgagagcgcccagggggtgggcgtcttgccccgggcgtcgagagtttggggccgtcccgtacgcggcgcgccgcaacccagtccccgcgaccacagcagcctgctccccaccgcgcttgcagagcccggacgcgcgtgagtcgggggcccgcagaggcctcacccttggaggtcgccgcttgtcaggcctgactgctgttggcgcccaccccgccgcccccgaggggccgctcgaggccggactgctgctttgccgtggcaggccccacccgggacgtggcgctgcgggccggggcggtccagctgtgagtcaggggttaatgtggcgggataactctctgcagagggaaggagctcgcaaagaagggtggaggaggggaaaccgcaatggggaactgtcaccgaggctagtggactctccctgcgcttt

SEQ ID NO: 204 - DNA, 362 bp, Homo sapiens
tcgagtccagaaaaaaaggaataagtagaactcccaaaggacagctttcctggctgaacaagatgtaaacagtttacgtgatttccaaccaagcgcaaaagtacaggtgcaaaagaagacggcagacaccaaacttcccctgcagccacgccctccccactttgggagtctgggtccccgggaaggaaggcctccctattggtgctcaacgtgttacgtcacttccgctacctccacggcaggcgtcgctaaatgacgttgccgtttccgggtcacccaggcagcttgtggcggcgaagccatcggtgttcgctgatgtccagtctatggagtcagttggtaccggtggcggcgcggaggca

SEQ ID NO: 205 - DNA, 144 bp, Homo sapiens
ggaaaccgggagaatagaagcaggcaaggaccgccgtgggcacggggtcagtgagacagggtcctgctcgcggcgtcaaggaggagcgctgtgggtgggtagggtaggcgcgccccctcggccttgcctttccaaccactcttt

SEQ ID NO: 206 - DNA, 410 bp, Homo sapiens
ggtggcgggcagcaggcccgaggcggccaggtagagcagcaggctgagcgcgaccgcgcggtagcggcccaggtacacgtcggccagccagccgcccacgggcgccagcaggtaggaggcgcccaggaataccagcgcggcgcgcgtcgcctgctcgccggtccagttgaagttggtgctgttgaggtacagcacgaggttggcggtgacgccgaagaaggcggcgcgctccagcatctccaccagcagcacggccgcgcccgccgcccgccgccaccgtcgagggccccgcgcaccgcgaggcagcagcggctggcgctccccgggcacgcggggctgctcccgggcgcgcggcgcgggcatcctggctccgggctgggccccccgcggctcttctctcctctcctctc

SEQ ID NO: 207 - DNA, 159 bp, Homo sapiens
gagagagggagggagcgcgagagggggcggggcggactcgaggggcggggcattgcccacgtgaccagacgtccccgggagcgcgaggtggagcgcgcgccagctcccttcggtgctgagtgcttagtgctgggatctcgtgggtctctgtcggctttc

SEQ ID NO: 208 - DNA, 150 bp, Homo sapiens
caggcgaccaagccaaggccctccggactgacgcggcctgagcagcagcgagtgtgaagtttggcacctccggcggcgagacggcgcgttctggcgcgcggctcctgcgtccggctggtggagctgctgcgccctatgcggcctgccgag

SEQ ID NO: 209 - DNA, 164 bp, Homo sapiens
gcgccgggaccggaggcggaggcagggccgggcgggggctgcggtggctgaggcggcaccggagtctgggcggaagccggacccgacctgcgagcggcgccgtcgcccgggagtagcttgtagaaaccctcgcgcgtgcggaattgcgacttaatctccgcgca

SEQ ID NO: 210 - DNA, 166 bp, Homo sapiens
agtaagaactggtccccgagaaggaaaggaaagggaaatcaaagcaaactctgacgggaatggagagacgagtcctggtgagggtgacatggtgtcaccctccaggccaggccggataaggagcggccaacagtgagggtggggcgcagagtggcacaaaaatagc

SEQ ID NO: 211 - DNA, 201 bp, Homo sapiens
cggtgccgccgtgtagttggcgccgctgccccggctgagagtgagcgtggtgtcgacggagggagatggcccgggagcgccggcgccagtaactgggagctgatgagagtcgccgagggcgcgccgggcccaggtgccggggctgcccgccgcccgccgccgccgccgcctgcgcgcccgcccgcctttcgcggccgctct

SEQ ID NO: 212 - DNA, 149 bp, Homo sapiens
ggaagaagagaagtgcccgcaggctccggtggccgagcccttccaaaatcacctccctttctggaatcttctcttcccccggccgctgagccagggcagcacgctcagcccgttagtaggccctcctacttcgccgcggccgccgcagc

SEQ ID NO: 213 - DNA, 157 bp, Homo sapiens
tcacgacgccaaggcggtcgccgggccaatgggaggccgtcgcgggcagggacggggccgggaggagtcggggctgggccgcgccgaggcagctggctgactccagtttagccgccgccggagaggacgggcgccgagccggggctgcggacttcgg

SEQ ID NO: 214 - DNA, 127 bp, Homo sapiens
gggagtgggggatgctggaccacagggcagcacctgcccggcaggatgcgcgtgcctgtgagccccgggactccccagggtcctgggcactggggctgtggatcctcggaggaactcagagtggttc

SEQ ID NO: 215 - DNA, 146 bp, Homo sapiens
gccgggtggcatctccaccctcaggccttccggccctgcccggctggcccagccccagggccgcttcgtgtagccggcgccccggtaccgccgtggggatcagcctcacccgagccgcacaggcaccctcaggaagctcggcccgg

SEQ ID NO: 216 - DNA, 141 bp, Homo sapiens
cctcgacttcccagcgcccacctggaccccgcaccactcgcagcgcacgccggccagcacgtcagaggagccgcacgtcttcctgcagacctcgcagcgcgctcccgagggcaggttcccctcccgccagtggtggtgatg

SEQ ID NO: 217 - DNA, 259 bp, Homo sapiens
aacgggagaaattaactccccggggccgccgggttgactgcgctgcctgggccggaggtcttctccggccagggagcgctgtgggaaggggctcgagcggccagggccaggcgaggccgggggggcggggggttaggggaccgcggggctactcttgggagcgcccctgtccggctggctgcgcgccggttttaaatagcatctttcggacttgtcttcgcggccccagtccccgacctcggcgctgcctgggctcctg

SEQ ID NO: 218 - DNA, 342 bp, Homo sapiens
caaccggagaattgccccgcgtgtgcaaggagcggcgtgcctccacgcagcagcaacaacaacagccgcgcgagtggccgcagcgtccacgccgcccgcgagtggccgcagcgtccacgccgccagcgcaaagtcggtgcgcacagcctggcgcgagttcgaagctggagagggctgtaaaatagattggggggcgggggagaccacgtgattttctggaacgctggctcgcctctttattttgattctcgagtaaacttacaatccccaaaatgcgttgagggcatcggaaagagtaaagtcacgttccgctggaaaggatcacttcttaagttcacatga

SEQ ID NO: 219 - DNA, 150 bp, Homo sapiens
ctacgggccgaacctgggtgcggtagcgcgcgcgacgctgcgcagctacaccgctacccctggcggcggcgaaggaacggcccgactgcagagctgcagccgcaacggatccgtgcgccaaccctacgtcactgccgctgcggcccgtgg

SEQ ID NO: 220 - DNA, 144 bp, Homo sapiens
ttccccaccgcgggcaaaaaacagatttggcgtttccgctttctcgcttgtgttgggatccaggaaccggcgacgcgccggccaagtctcctttcctgggtctctctcgcgcgctctctcactgatgcactcctttgctcccac

SEQ ID NO: 221 - DNA, 138 bp, Homo sapiens
ccgggttgcgggtgatggcgatgagcggcaggtgcggaaacacatcggggatcgtcatgggcgtgagcgccgttatgaccgggccttccccggcgcccgcgctgccccccgcgccgccggctccttcctccgcgccgc

SEQ ID NO: 222 - DNA, 145 bp, Homo sapiens
gctcggaccccccaggacgatcggccggtgggggccggtggggccgcagactcggggggcggggggcgccaggcttccgggtcctgcccccgccccgtggggaacagcaggacggcgccgaggccgtttcgctttcctccgcgcc

SEQ ID NO: 223 - DNA, 277 bp, Homo sapiens
gcatttagattcaacagttcacagcggcgggctgctgctgctgcctctccgaagagctcgcggagctccccagaggcggtggtccccgtgcttgtctggatgcggctctgagtctccgtgtgtctttctgcttgttgctgtgtgcgggtgttcggccgcgatcacctttgtgtgtcttctgtctgtttaaacctcaggatggctcgcttcggggaggcggtggtcgccaggccagggtccggcgatggagactcggaccagagcaggaaccggcaag

SEQ ID NO: 224 - DNA, 207 bp, Homo sapiens
tatcacacgccatgagctttgtcccacatcctttcaatccgctcctctaagcgccgtcctgagctttcgtcccagatacgcagaaggaagcggcctgaatcttacccagtcctcgacgcgcccagcttcttaactgcagaggacgaagcggccgcatctcccggcaaacgcgtgtgaagcagcggtgccgccattgggccgaactaa

SEQ ID NO: 225 - DNA, 136 bp, Homo sapiens
cagggatgcctcgagccgcgccctcgccccgcctccagcccctctccggcgctcgcaggagtacgcagccgactgccaggcgcaccggcccgccccgccccgcgctgcactctacttccagggcggcgccctggca

SEQ ID NO: 226 - DNA, 144 bp, Homo sapiens
cagcccccagctccgggctccgcctcccgatcggccctggaccgcccccccgcgccgcctcccggggcccagccgcccgtccccgatctccggctccccccgcagaccccgagcgtttcggaggctccgcccggcctcgtgcaa

SEQ ID NO: 227 - DNA, 141 bp, Homo sapiens
ctcctcccagaccccttcgcggtggacttgggggcctcgccgggttcgccttttccgtcccacgctcctttctctcgtctccccacccacgcccggggccatgcccagctggacctccccacccctgcactcaccctggcg

SEQ ID NO: 228 - DNA, 606 bp, Homo sapiens
gttgggaagcgcagtcctaaaggagacgcaggttggagactccgctaagcggagaagccgcagtggggccatggcaagtcaccttccctttcgggcctaggaatactcattcgaaagatggggggactggagtgccgagtggctgtggcagccacgattggggtttggaaaccatcctgaaaggcccggggagccagtctcctggaacttctccctccccattcccacaaaaaccaagcgccctctcggccaattctcaccctctcaggacaaaaaagtgagatgagcccgtcctttcacctgcgagtccaagcccttggcagaggcctgaaaagtccgaaaactccgagttcgggcgctgaggtctcccgagccggttcctgaactctccgggcctcagtcgatcggggtgcggagggggccgacccgggggatctccaagcgccctccccgccctgacgctgtggggctcctaccgcgccgccacagctgctcctacctggggaggtgcgcccgggccccggggggcgggcagtcggggggcgggcagggaaccggtgccgccccacgcttcgtggcccctttaaggaggggaagccggcggag

SEQ ID NO: 229 - DNA, 361 bp, Homo sapiens
ggaggggggagcgaagcagtgtggccgaggtgggaggcagccggcacttggctccagcttggtcctcgcgactccccaaaaccgtatataaatatatctcttataaaagccgagaggaagcaaatcagattccaggctgctgccaggtgttgtctcgtcttccgccgttgctcagcacccgccgctgcccccactggctcgattcccaaaggggtggtgctggaagggaggtggcggggcggcgagctgaccgtccgagaactggaaacaaggttcttgcagcgagggaggctctcggctatctccgccgccggcgccgcggccgccgctgctgcattcagcaccccgggcgagtggacag

SEQ ID NO: 230 - DNA, 387 bp, Homo sapiens
ggtggcctgtccggtgtgccgcgcgcccacgcgcctggccccccgccgcggactccccgcgttgcccacgcagtccggtctcctgccccgcgacgcgcgcgcaccgccctctcgccagggctccgtgcgcttcgaccggcgccgcggccttctctacctgcggccgccgccgcccccgcccgggccgcgcaaggcccgcgccccgccgcccccgccgcctctgcgcctgggccgcccgctgtcgcgccgcttgtcgctggccagcccggcctgggtcttcaacgctgccgtggcgctggcggtgctggtggccgcgggcctcgtggtctcgggcgtctacatcttcttcctcatcccgcacgccacctcctccggccccccgcggcc

SEQ ID NO: 231 - DNA, 252 bp, Homo sapiens
gcgggagggaccctgcggacagggcacgagtccgggtctcggaggaggtcggcgactgccgcgtgggtccgcgactcaccaagtacagcggctgccagcgacgctgagtatccaactcttcgaactcccgctcgatggtggtgggcatggctgcgggagcgagctggcgcgagcagagcctgcgccggcggagaggctcaggccccgcacgatccggggagagcgctggcgctgcggcgcatgcgcgctgcg

SEQ ID NO: 232 - DNA, 174 bp, Homo sapiens
gtaggtgctcagtcaaggtgtgaacgaatagcaaatatccctttggaaggctgagtggccggctccgcatcgcagaaggcggctcaggggcgctccgcccggactttgcctggtgcggccgcccgcgtttccgcctgcgcccagcgcccggggattgacgccttgcgggcgggg

SEQ ID NO: 233 - DNA, 177 bp, Homo sapiens
gccggctgccctgccgcgtccgctcgcagcagctgcggcgcgcggggtgaagttgcggggctggcgggcgcgagggtggcggagcgcggagctagagcggcggagcgggcggaggggcgggagccgtgaggagggggaggcgcggcgcgggggccggcggcgtcacttgtgctggga

SEQ ID NO: 234 - DNA, 487 bp, Homo sapiens
aatagtttccaatccagtgggacgagtcactccatataattctgtgaagtcaaccattcctatcaaggagagagtcggggccgccgcgagcgcgtgaaccgtgggctccggggtggtgccgacgcggctgcgggccgggactgacgttgcgccgggttcgagtactcccctccggagttttgtcccggtgcggctccggtacccagacgcttcaccacgccccccgccctccgcccgctcaccccggttcccgccgccccggagcacgctcctaaattgcggcgccgtcgctatggcgtcactgccctcgcggccaatccaagggctgcgcgcgtgtcccttacgcatttccgtcgccgggaggaaggggtgtgtgtttcgcctgcgcagtggtcctggccaccggctcgcggcgcgtggaggctgctcccagccgcgcccgagtcagactcgggtgggggtcccggcggcggtagcggcggcggcg

SEQ ID NO: 235 - DNA, 208 bp, Homo sapiens
ctcctgacctcgcgatccgcccgcctcggcctcccgaagcgctgggatgacaggcgtgagccgccgcgcccgcccattttttttaaacgtgttggggtttgggtttcagccacaggccttctgcgatgagaggaaacccaggacgcgcagccccaggtcaggcccgcggaacagccgggcggactccggggctcgcagactcgcgacc

SEQ ID NO: 236 - DNA, 1444 bp, Homo sapiens
ttcgccctcaaagttctgctcctcccgggggcttcttaggatctaaaaggatcagtcctagccatctcgtcagccatctcagcaagggctgacggggcggaacagcaaagcagaggcgggtcctgagagcgtggagcctgaagcccggcgccagagggagaccaagagggtgagatgcggctggaacccagccagagcggagactgaagcctgaactaggggccgggcctcaggcctaggaactagccacgagctgaaaaggaggcggatggcccggacagaagaggcggggctttcagaccagagggcggagccaagagctgaaaagggtggtgatttggtccagaagaggaagaacttaggctccggaggcagagccaaaggctgaaggggactactccctaggacagaggccgggaggtatcgggccgacgaagccgagtggcgcggaggagcggagccttcagccccgcggctgggccgagcccgaaggtggcgtcggtgtcggggagccgccgcgtgcaccggccgtcctccctgggccgcatcgcggtggtggtggaccagggctcgggcttcaccaaggcgggcttcgcgggcgagaaccagccgcgcatagtgctgaagagctctagcttggtgcccagctgggaccggccggtgctgcccggagcgccgggctgcgagctggcgggcggcgtggcgcgggcgcaccccatcaagcacggcgtggtggcggactgggaggcgctggaagggctgtgggagcgcctgctggtgggcggcctgcgggtgtgcccagagcagtggcccgtgctggtgagcgactcgccgttggcgccgcccgcgggccgcgaaagggtggcggagctgctgttcgagaccctggcagtgcccgcgtgccacatggctagcaccgcgttgctggcgctctgctccaccggcgcgttcagcgggctggccgtggaggcgggcgcgggcgtgtgccacgccacgcccatctacgcgggtcactcgtggcaccaggccaccttccgactgaacgtggcaggcagcaccctgtcgcgctacctgcgggatctgctggtggcggcgaaccctgacctcttgcagcaggccctgccccgcaaggccatcacacatctcaagaagcgcagctgctacgtgtccctggacttcgagggcgacctccgcgaccccgcccgccaccatccggccagtttcagcgtgggtaacgggtgctgcgtctgcctcagcagtgagcgcttccgctgccccgaacccatcttccagccgggcctgctgggccaggctgagcaggggctgcccgcgctggccttccgggcgctgcagaagatgcccaaaacgctgcggacacgcctggcagacaccgtggtgctagccggcggctccacactgtttcctggcttcgccgagcgcctgg

SEQ ID NO: 237 - DNA, 146 bp, Homo sapiens
aaaaatctgcctgcctttctgcgggtgctgctcgcaggtgctgccccggcgctcacctcggagctatttccccgcaccccactccgtccccatcaggtggggccgccacagactctgcgccctttcaagacatttctccactaggg

SEQ ID NO: 238 - DNA, 143 bp, Homo sapiens
gtctcgtcttcggcctctgctgctgcgctagaccccgcgggttcccggacttcagtaccgccagcgcggcccgggtccgcggttgttggacgggcgctgccttttccgggttgatattctcctggtcctcttggagcgccgtc

SEQ ID NO: 239 - DNA, 214 bp, Homo sapiens
cgggggccgtgccgggcgccatcatggacgaggactactacgggagcgcggccgagtggggcgacgaggctgacggcggccaggtgaggcggggcactgggcgcaccctagagagaatcgttcgtctccgccgccggcgggccggccccactcccggagaggccgcgcggcgcgaggctgcgggcgtgcggggggtgtgcgcgcgcacggcccg

SEQ ID NO: 240 - DNA, 232 bp, Homo sapiens
aactcactccatttgatcccgccaccgggtgcgaccagccagagccgcagcgcccgggaacccatggccagcgcctccatagcagcggtgagaaccgtcgcgcgcaagtccttctccgccctcctcccccggaaaccgaacgcgcactcggagttccgcaggacaggtctgttccggacccagcactcagactgctcgcctccaccggggggcgtcaggcctcgctggggat

SEQ ID NO: 241 - DNA, 124 bp, Homo sapiens
ggggcggcccggccaccgcgcggagccgggtgtccgccgactcgcaagggggacgcgcgggctcctcgtccccaagctccgccctgcgcctttgctgcgccgggccctcccaggcccaccctgg

SEQ ID NO: 242 - DNA, 834 bp, Homo sapiens
ggagagagaggccgatccgtgttccccgtgttgctatgtaaggaggtgcgggaccgaggaacctaggtgtggacagggacaggcaaggcgggggacgaagagaaatgaaagccacatcggtggcggatgttctgaacacaactcgctcgctaccgcacgttccccgctccgcactcagcggatcccgggacggcagcaggtgggctgcacacggactctgggacaagtcgagctgaaaaccgcggagctaggggtggggtggagacgcccgcgacgccaaggctggggtcccggaacacgctgggaggagggtggaaggcaacctcggggaaactgggaaaggcggcctggacttcgggaacaccgcgtacctgcgggggcacagccccacccgagcgaacgggctccaaaggggaggtcccgcggtgcccaccgcgcagagctcagggggtggtgcgcccggcccttctgcggcgcacagcccagcccaggaacgcgggcggtgcggactcagcgggccgggtgcaggcgcggagctgggcctctgcgcccggcccgacctccgtctataaatagagcagccagttgcagggctccattctgctttccaactgcctgactgcttgttcgtctcactggtgtgagctccagcatcccctttgctcgaaatggaccccaactgctcttgcgccactggtaagggaagctctgcgccctggaatccccatttcccagccctattacagagggtctctgggtttcaggaagtcgcattttaagttctgagcgacggggactccagtacttcgttagatgctttcttcctgatcacgc

SEQ ID NO: 243 - DNA, 170 bp, Homo sapiens
catcgccgggtctgggtgcgcgcggcagccggaactcggggcatggccggccggcagggccgggagcggcagtggtagcgggagcgctcggggccggcagcgcccgccgtgcgctcttctgggcggtggaacccgccccgtagattgcgagcgctgggggcggggcaggg

SEQ ID NO: 244 - DNA, 212 bp, Homo sapiens
gagagctctgctttcttcccattggttgacaggcatcctactctctccgcccctccggtcgcttggtggcgtctcaggacgcagcgtgatgacgtaggtccccgacattccatatacaagatggccgcagtcggcaaggagagacgtcgctgaggggcttgcctgaagcgaggggtgagtgacccaccgactgagggcagcgccgcccacct

SEQ ID NO: 245 - DNA, 149 bp, Homo sapiens
gcttggccgcggggcgcctggctcagtggcttctgcgggcttcgaggagcgggatgttgcgggctgggtggctccggggcgcggcggcgctggcgctgctgctggcggcccgagtggtggcggcgttcgagcccatcaccgtgggccta

SEQ ID NO: 246 - DNA, 409 bp, Homo sapiens
gctgtcaactcgtagtttaaaaaaaattccttgaaagaggtagagaaaagtcaagttgcagtcccacacagagcctctgggcgccgccgtcggccagtgcagagcaagcgctgacgccggggatccctcagcctctagcctgggattccctgcgcagccaacaacagaaaagaaaaccagctcccacacagaggctcccggctgcgcagaccttgcccagcacaccagattgccagctccgagacccgggactcctcctgtcctgggccgaatgctcttttagcgcggtagagtgcactttctccaactggaaaagcggggacccagcgagaacccgagcgaacgatgggagggagctgcgcgcagaggcgccgggccggcccgcggcaggtactatttcctttgctgc

SEQ ID NO: 247 - DNA, 138 bp, Homo sapiens
gatgcggagcaggctggctgggctgcagggcgagcagggtcccagtgctgcgcggcgccggctgggtgcgctctgagcccgtgactctgctcgcgcctttataatccaacctgccgctgatgtcatcctcccgcccac

SEQ ID NO: 248 - DNA, 188 bp, Homo sapiens
agctggagcccaacgggctgcgccttcttcgccgtgggcccggctcggagcccccaccccaggcctcaccggcccagcgcgaggctgcctcaccggaaacacgaggccgaattccaagctattgtcctgcttcgccgggggtcgcgcactccaagcggcagcccactggagtcccagtcgccacgaca

SEQ ID NO: 249 - DNA, 355 bp, Homo sapiens
gctacatcccgcggcgctggaggcggcctgcggccgagcggccccgatcttcagcgccctccccgcgccggaaggggcgcgcgacctcccgcgtcacctccgcagccgcgtcacctcctcgcgggctctgcctgggccctccaatcctaggccctctcgcggagtcccaatcacaggcccgcgcccgccggccacacctcccgccccgggccccgccctgctgccccgccttccctgccgcctgcccacctccccgccgcagccaggtaacctccacccgccccggggtagaggacgttcgtcggattctacactccacctcgttatcgcagcctgaagtgcgtgatggagaaga

SEQ ID NO: 250 - DNA, 311 bp, Homo sapiens
ggtagaagccgggaccctcctgcctctggctgccgctctccgaggggcggggctgaggcggggcttggggcggaggccccgcctggaactgagggtggggcgggtccgggtccgggaggagtctcagctggagcccacccggttcctttcctgattgagcaggtcggatcccagggtgggttcagatttgaagggcgaggttcgaggccaagcccccgtcgcagcctaagactgcgggcttttctcctctgcagggatggggtagggcagggccaggggcggagttttgagcccagcccttgggttcttgc

SEQ ID NO: 251 - DNA, 189 bp, Homo sapiens
tctcggtgagcgcgggaaatggagggtgttgggtgagggtgctgcgtgcgggcccaggtgctgcgcgcgagggtgcggagttgctggcatgcagggtgcttgcgctgcgcggaggggagggtggcagggtgttgctggaggctgtgcgagggtgggggcgcgggcgtcgtggggtgcggtgtgtgcgaa

SEQ ID NO: 252 - DNA, 155 bp, Homo sapiens
cggaaaggcaggaagggggcggggaagggatggcgagctcggggtgcaccgcctgtttcttttctggttaggtatcgtccttggagaagatggaagcggagaggcggccggcgccgggctcgccctccgagggcctgtttgcggacgggcacctg

SEQ ID NO: 253 - DNA, 241 bp, Homo sapiens
caggcaacttgaacggagagctcacccgccagcccggaaaggcaagccccagtcaggcggaaggtagatggtggaggggcgccgcggcggatggaggtgcccagggccacagaccgctcacagcggtaccggggcggggagcagggcgggcagggaatcggcccgcccttcgtcctgcccctcgccctactctgtcaccgcccctgggaagagtggaacccatacttgctggtctgatcca

SEQ ID NO: 254 - DNA, 160 bp, Homo sapiens
tttgggcccttgcagaggtcgccgaggggcccgcgccgccgccagagcctgggcccagtccccagtcttcagagacgccctcgaccttcctgctccgaggagctggcctgatgtcctcgggtcgcggtattcatggggaggatgggagccgtgactatag

SEQ ID NO: 255 - DNA, 183 bp, Homo sapiens
aggcagtaggtcagcattttccaaatgttatttgggagcagaaatgttttgggtcactggaccgtgctttacgtggcacggcaggttggcacgctacgcagatgcccttttcgttaacatttccgcttgccagttgctccgggttttaatcctgggctggatgcagaagtgatgccacctcga

SEQ ID NO: 256 - DNA, 157 bp, Homo sapiens
ccgccgcaaacttagaagtgagacgtgcagtccccaaggagctgcagaaaagggctcttccggagtcctggggattgcgcgtttaaaggggaccctccctctccccggatcttctctgagcttggcaagttaatcggaagcactcgctggcctctca

SEQ ID NO: 257 - DNA, 149 bp, Homo sapiens
cgatgtaactgcaccgcgctggggatccacctcccgccagggtgagggcgccgtcctccagcgtatgctaggcaggcgcgccccgccctcctggtcacgtgaccacgcctacagccgaagaggatgggaaaatgcggccctgttcctga

SEQ ID NO: 258 - DNA, 145 bp, Homo sapiens
tcccaccctcgcgcttcaggggccgggtcccgtcccgccccagcccgcgtctctccctggacccgacgtccggctgcgcgcgtggaccaggacacctaggctttcaccagcgcccgtttcctccggacgcggccgtctagcgccg

SEQ ID NO: 259 - DNA, 148 bp, Homo sapiens
ttccggtggcctctcccgcccccggccgcccctcccgcaagtccggtgttgcccccgcccccagagtccataacaaccgcgggcccacagtgcccgcgcctctccggagcgcgcccaccgccccctccaagtttgcgggcaaaaacaa

SEQ ID NO: 260 - DNA, 246 bp, Homo sapiens
gaaactctcgctcatccgcggcgagcggatcccgggcacaggggctggaggccgacccggtgagagtgcaaggtctcgcgaccaccgacgacagcagacagcgagtcgggccttcccatctgaggccagcttcagtacaggcctccaagcccgggcttgttttggccgcgacgtcacttccgatttcttctttcgccttctggctaaaaaacgttccgcagcaatgcagctgaaactttcgggttt

SEQ ID NO: 261 - DNA, 147 bp, Homo sapiens
gcgcacgctggccttctttgttactactttggctcagtggtttcctgggctcgctgctcattccctggcagggctcgcggcgtccgcggcgactcctgggatcggcaggggcctggcttccagcccagcgccggcagcagcccgggg

SEQ ID NO: 262 - DNA, 147 bp, Homo sapiens
tccgggcaccaggcaacacctaggccgttcccttcagacagccccgggccagcggccccctcgggaaatgtccagcggccgcagaaggggcagcgccccctggcacagcttctcccggttcttcgctccccgaagtccttcccggga

SEQ ID NO: 263 - DNA, 146 bp, Homo sapiens
gaggcccgcgaagcgccgtgggagcggccctaatggacggtgggagccaggagggttagacgccgggacttaccgagcggctccctcatgccgcctcgcgccgccaccgccgccgctccggccggccggggaccagcgcgacccgc

SEQ ID NO: 264 - DNA, 148 bp, Homo sapiens
gcgggggtctcagccctcgtctgtcgctgcgggtctcctcgcatctcggcgtctctctccgcgtctctctccgtcccggcgcctgtgtcccgggctgtccccagctccgagcctcagttccctgcgcgcctccatttccctccttccc

SEQ ID NO: 265 - DNA, 520 bp, Homo sapiens
agcagcttgtttgcactttggaacacctcgtgcttccagagccggcccatcctgctggggaggggagaggtcccagcgctgctgtctggcagaccttggtttcggtgggcaccagaagcgaggcagattgcttgctgctgcaacttcacgcgtgagctccaggctcccctggttggaaggtgccagggagtgaggcgggtgagcaggcatcaggccaggggtttgtggtttgcttttcaagtcaggctgctgctgggagaaggaacgcttgcggtctcgccagctgctctgcaattgtggcggcagccagcagagataggaggcggtgggcctgccccgctccagcctggactttccacttggagggcctgacttctccgcttgacccgagacatgcagggggctgcggctgggccacggtctctgcagctggggcctttctctctacggatcctcttgcgggagcaatttggtatctgctctgcgaggtttccttccagaaagaagtgaggacttcaga

SEQ ID NO: 266 - DNA, 160 bp, Homo sapiens
ccccgcagccggggcagagcccaccgcaccagctcgcggagcagccgagccgcccgttacgccgctcacctccgtccccgtaggtctccacgccgtacccgtcttgcagcccgttactccaggtaccctcgtagcgagcgggggtgcacaggctctgccg

SEQ ID NO: 267 - DNA, 402 bp, Homo sapiens
ccgcatgtagcgatgtggagcgcggcgactcggagtccttctcggagcccatggccggcagaggccgaggagccaggggcgcccagcgccgccacagctcccgcctcagcgcccctcagccagcgcccggccgccgccgacgccgccaccaccgcctcaaccgccctcccggcgatagaagccgagcggcaacgacgaagtgattataaagcctccgccccgcgcgccgctgccctgcgcaggcgcttcgctcaaacacctcacaacccttgcgccccggtctaggagtgcgctgggcagggccgagcggggtggggccgagcgagctggggcggagctccgcctcctgccggtcaggtggttccagggccgccatgttgcggagactctcagagatcctag

SEQ ID NO: 268 - DNA, 173 bp, Homo sapiens
tgagattaagagccaggcaactgaacacgtgcaaaaggagggtgaatgtgcagaagtctagatcttgagagcaggggaggaagttaagttttgaggttgctagagcagaaacacttgagcaatagatgccaggctggcggccgtggttgggtagaaaccaaagacccatgggc

SEQ ID NO: 269 - DNA, 141 bp, Homo sapiens
gcccgccgggccagccgcctgagccatcccgcgggtgggcgctgcgctcggcagtcgcgccgtgtgccggcgtctcctcagctccggagcatcgtcgtcgcgcgccgccgcctcaccatccccggaaccgccgccgcccaa

SEQ ID NO: 270 - DNA, 157 bp, Homo sapiens
gaaagcagcagtttagagatggaaagacaatagccctgccatttcctagcgactgggaccttagccaagctgactaacctctcttagcctcagtttcctcgtctgtacaatggggacaatctcagtgccaccttatcagagttgctgggaggattga

SEQ ID NO: 271 - DNA, 140 bp, Homo sapiens
agcccgcgcgcgccggctgcccgcgcctcggccctgccgcccgcggctcactcgaaggcccctccgctcccccgcaggcggcgctgcttcctgggaaccatgttcctaacggctgcgccgcggaccccaaggcgtccagg

SEQ ID NO: 272 - DNA, 494 bp, Homo sapiens
ctctcctccacccctggactcaagtctgcgtggtgttggccacactgactgacagccaggggacatgcactcaccagcagggtgtgtccctccggtcttcacaatgaatgctggcccagtcgccagcagccttcacgccaatgttctcccgtcagtgaggccaggcccccaggtgccactggagtcagaggagggcagctggcgtgcgccaagcagccactaggagccacttcatgccaatgctccacttcctgcacgccacagtcacgttcagctgcaaaagtagttatgctttgggtttttttggtttttttttttttaagaaaaaaaaaaaggaaaggaagaaagcaattaaaggggcgggggggacttaaagtttgcacctcagcatgagtcaccgaatcaaagttcagcaaccacatgcaaaacaaaccctccgtgagggcagcaagtctccgtgaggacggctgggattggctgcacagcaaagccag

SEQ ID NO: 273 - DNA, 168 bp, Homo sapiens
ttccgagcactgacgttactgtcttgtccccacagaagccgatcctactgcagggccatgagcggtccattacgcagattaagtataaccgcgaaggagacctcctctttactgtggccaaggaccctgtgagtgttggctggagggggtccgggaggggcgggatcc

SEQ ID NO: 274 - DNA, 205 bp, Homo sapiens
gcgcggccgcggcgcggtgggtgtgcgcggggccttctgctcaggcctgcggcaggccgcgtgcggacttggtggtcgctggggtccgcgacggggtgggggctcccggggaaccgcacgcggccgggccgggcggacgacggagtgcggaggggggcggctggcgggagggtgcgccatgaaaacaagggctggaaaagcgccg

SEQ ID NO: 275 - DNA, 312 bp, Homo sapiens
aggccagaaaacccggtaccaccaaccctggtgcagcggcatctcctacctgatgccgcccggccccggctgcgagtcaggaagaggataaagccgactagcagagccgccgctaccaagtaccacacaggcgccaccatgacgagggcctcagtgcagaaccactgcgtccaccctgaggccgggatctcataggccccgcccctatttcccaatctagactccgcccactactcggagccccgcccagcggcacatcacagagaggctttaatgtcagacattaaaatgagtttggggggtgtaaagaaa

SEQ ID NO: 276 - DNA, 145 bp, Homo sapiens
gatacaacttgtcagggagggtctctaaggttccccgggtggtaacaagcatttaaaaaggcgatgtggattcagacggcctcctccccacagcatcccagacaaagccgggctaggccccggggcgctcctggtgcacctgcaa

SEQ ID NO: 277 - DNA, 253 bp, Homo sapiens
acgggaacgggaatgagcatgcgcattctgacaaagcgaagccaaaggtggccattttgactaatgtcaacggtttttcggttttttttgtttttttttgcggtgccctttccggaagtcattcaggatgccatattgactaagggcaagtggtacttcctgaatgcgaattattcttggtctcactgtctgcgggactagggcccttggaaacgattaactgaacaatgtcagctctcacagtagaatcaga

SEQ ID NO: 278 - DNA, 150 bp, Homo sapiens
atgcggccccaccgcgaggaagctgcagtcggggcccggatcccggtcctcccctaccccggccggccctccgcctgcgctccagcccctcccgcgggccccagagtagggaacgcgcaggactcacctggggcggcgcggagctgcggg

SEQ ID NO: 279 - DNA, 209 bp, Homo sapiens
ggaccgctggagcccggaggcggaggctgcggtgagccgtgacccctctaccgtgcgggtgaagggcagggcggagccgcccctgcgccccagcgtctgtggaacggggacggggagcggggctggggccacacgagggccgcacagggtgggtgccactgagggtctgggggccgagcccgtgggagcggacccggcaacggagagga

SEQ ID NO: 280 - DNA, 149 bp, Homo sapiens
ctggaccctgctcgcttcctcctctacccaggcgcggagctcagcctacctcgtggacccgcgcatttgcgggggcttgaattcccgagcttctcgcttcctacgcgcgcagcagacccgcagctcggtggccttggctttcatggcct

SEQ ID NO: 281 - DNA, 146 bp, Homo sapiens
cgcagcaaatgcctgcgctgctgcaaaaaaaacaacttttggcgcaaagaatgttgcggccagagagcatccgctgtcgctgacaaaggagtagcaatggcaatgagaaaccgccggcgccacggccgaccgcggcggctcacgcc

SEQ ID NO: 282 - DNA, 146 bp, Homo sapiens
ccggcggcgacggccgcgcgacctttccggggacggtctcgggagtgccatggggtccctggggctcggatctcggcgcccgcgtctccgccgggggcgaccccacagccaggctccttcttcggcacagaacccgcctcggctac

SEQ ID NO: 283 - DNA, 150 bp, Homo sapiens
cccgtttttcgtcccctccgcctcgtacttccgagaccttacaggcagagctggagctccctcgcctctcgcactggccgcggaagtgaggtcactaggggcaggctcctcttggccaccaccatcgtgtgcttgcgtttctatcctctg

SEQ ID NO: 284 - DNA, 130 bp, Homo sapiens
ggcggacaggcccggctgctgggggctcccggagctctcggggggcggggacagcgaggtcccccgacggctcagcctggcagtagcagctggcttcctctcggtgcacggcaggctctgctccccgggg

SEQ ID NO: 285 - DNA, 153 bp, Homo sapiens
aggctgagactgcggctcgcgggtctctccaccctccccctgcgtcctcctccgccctcctctgccggatccgacctgcgcccctacgctggcccagctgctaggaactagcgccccgagcgccgcccgctcgctgcatgagcgcccgagtcc

SEQ ID NO: 286 - DNA, 135 bp, Homo sapiens
ggcgagagcgaagcccgccaagcgtccggaggaagctgtccctgccgcggagctgctaccggggtggagtacaaagcggaaactccctctgccgccgccgccgccgccgccgccgcctgcccgaagcgccgcagc

SEQ ID NO: 287 - DNA, 270 bp, Homo sapiens
gcgttcgtctacgcagaaaaactgaataagcagcattaaccgcgggcagaaacagaacagaaaccactaccttggcggccgcccgcccccgggcgtcgcctacgtcataacactgcgcggccgcccctcgcgcaccacgtgctaggggagcgggcgggcagatggctgtgtctgtaagcgggaggcgtgcccggttcatccaaggcgcaagatggcgctgctttttgcacgttctttgcgcttgtgccgctggggagccaaacgattggg

SEQ ID NO: 288 - DNA, 145 bp, Homo sapiens
aaagtgcaggggaggcccgggtctcgggtgacacccccacgccttgagcgggactgtggttgcgagggagggacgagaaaacacgcctacgccctgcgtgcgctgtgctgactacctctccagcatggaggcttccagatgagca

SEQ ID NO: 289 - DNA, 168 bp, Homo sapiens
gccctgccacagggagaaatccgcccggcctcactgcttcacagcaggccttgggcaccttctatccgacaggtgggctcccaggacccagcctggctgcaaccatctcttgaggtcgggtgcccccctgaaagggatttcactttttcacttccctccgggatgtcc

SEQ ID NO: 290 - DNA, 160 bp, Homo sapiens
ctatccgggtcttgccggcagccgagccgcagagttctggtcgactccagcgcttgaggcgaagtggccggtgaggccgggtgggcgggagagggaccggaggaaaggagacggggcgctgcgccaagttatcaaggccgcgatcaaagtcggaccaagg

SEQ ID NO: 291 - DNA, 631 bp, Homo sapiens
cgcgcagactggctcaggtgtgtgggtcgggggacggcgtccctgcgggcctcgaatgctgcagcagcgtcgtgtggccagtgggtacctgccccgagcagcaggcgctcaccggcaacctgcactcagcgcttcctggcgggcgggatcccggccttgcggcccccgcgccaggccagggcgcgacccgggcgccatcccctccctgccaggcttcatggcgctgggcggggcgcggccaggagcctctgcggctctcggcgccccgcagagccggccgacgccctcggaggactggcccttctattttattgggctcgaaaaccaagtctgggccattttccgccaccggaactgttgggaacgcggcgggaaagggtgactcggtcgctcccagccttcaccctgcgcctgaagtttgggtggaggtcttggtccccaggcccctccgccgtggggaggtgacggcctgtaagtagtaaaaattaagtcaatattagtactaacccatggcgggccgcgcttccccttcttcggctgagaacctcgccgagggccgagcgccgctgcatcgcagcggctcaccggcctcccctccttcccccactcgaaaggctgaggctggcgaagc

SEQ ID NO: 292 - DNA, 466 bp, Homo sapiens
gccccgtgtgtgcttgtggaaggagggcggggtgcggagcgggtgagggacccgagggtgtataacggggggtagggtgtcgaggaagttctaagacatgctcatagggattatgtccgcagagaggcccggtgtgtgttcatgggggacagggtggcacaggtaccagaacgtgtgttggtggggtcagggctctgaggcctggtgcgtggcgatgaggccctggatggtgttaatactgcgtgtctgtccgtggggcctgcagtgtgtgagaatgcagtgtgtgcttgtggagggcaggtagctgaaggactcgagtgtggtgtgtgcgccagtgggggtcatggctgtagagggtgtatgcctgtggcctcgaaggtctaggtagtttgggacccagtatatgctaatgagggcagagtggaggaaggacctgagggtatctaacggaggaaggactgtggaa

SEQ ID NO: 293 - DNA, 214 bp, Homo sapiens
gtcgcgggaagctggcagggtgtgtgtctgtgtgcgtgtggggtttgctttgtcattcgtacccccggtgcgcgctgacgcggtcggcctggccgagctctccagcatccgcagaagggtccccggcgctgttcctgggatgctcccttacataatgacgcgactggctgaagcgcacgtcagcgcagacaccgcacatgccgcaaacccgggc

SEQ ID NO: 294 - DNA, 146 bp, Homo sapiens
cacctgccaatcagcctccgcgcctgggggcacctgccgggcctcagcccggctcctggaacccgcctctgcctccccgcccgccgctgagcctggggcgcctccatcgtcgttcattgcccctaaccccgcgccaccccgagccc

SEQ ID NO: 295 - DNA, 142 bp, Homo sapiens
ctgtggaaggcacgccagggcggcgatgttatctctgggataaagggccggtcctaacgcagtttgtggtagaaggcgcagcaaaagcgcctaccgcggcgagtcccaggcagctcactctccagtcactctccgaggcggg

SEQ ID NO: 296 - DNA, 138 bp, Homo sapiens
ggaggcctcctccgctgacttgggtgaacagctctgagttccggagagggttcggtctgcggagaagcgcgcgagagacaagcatcctcaaggttctggtacaaaatttggaaaatggacctggcgttgaaatcttta

SEQ ID NO: 297 - DNA, 184 bp, Homo sapiens
gcaggagcggcggcccagcactcggcactggccacttgcaggtaggagcgcggggcccccccgcccactgcgcacgcgcggcggcccgttgctggcccaggtgcccctaggccggatagagtgcgtcccaaccgattcgcggccccaccccggcatctgtgccggccggccagggggtcaccca

SEQ ID NO: 298 - DNA, 141 bp, Homo sapiens
cactcataaattcggtgcggaggaacacaactagcagcaccacacccccgccactgccagaaccaaagtgacggtgccgacacccctccgcaagcgcaaggccgacttccataagtaattagccagagcaccgtcccgttc

SEQ ID NO: 299 - DNA, 983 bp, Homo sapiens
ctgtcgcagcctagctcacggtcaagggcgggagcctgctgggaagcacggccgcgggggctcgctcggggccacctgcctggaactcagcgcgaggtccagagttccctccggctgcgcagcggcgcacgtgccccgtggaaggggcggttcccgcaccccagaaggagggggcgcccggccgcgcggactttcccttttgcttacttcctagtcccgggcaggccggctcggaggcagcgagaaagcgcagccaggcggctgctcggcgttctctcaggtgactgctcggagttctcccaggtacgtcgtgcgctccccactcgtgtggtctctctgcaccccttcctggggtcgggtcgggcaggggcggaggggagccgcagcccggtcacgggctctggggaacccgggctcccgttcggctgcacctgggcccctagctcctgtccgggcggggatagcgggaagcgcaccaggcccccgggacgccggtgcttctttgcacggcccagcgcgggaatgtggacaccagcgaagccggctcaggtcggccctcgggagaagcaggggctacacggaaagggagcccgagggtcctgcagagcccgaggtcgggaccccgcgcgtgcagtgccaatgggctgcggctgggctgagcgcccttccaaccttgcaggccccgggggggttgccgcggagagcttccgctggggctccgggcctctggccgccacctccctcgggaggccgaggggggcggtggccccggcccggccctcccgcttccctcacggcctggccctcccgcttccctgattcccggtagggtcgctctccccgcctcctggcccctcttggctcggatgacaaagattgggtaaaggctttcaacgagctagcgtctggcagggggtgtgtcctcgctcactggttactgctaggacggagcttggattttggtcaccgtggctcagaggtgg

SEQ ID NO: 300 - DNA, 139 bp, Homo sapiens
cggggaagggtcgggcccggggcggggagaagcgtttatatgtcggcgaggggcgtgggagctgccacccgcttgcctgcgggacaccggagtcaagaggctgcccacgccgctgcctgtccgttccacggttccgagg

SEQ ID NO: 301 - DNA, 179 bp, Homo sapiens
tgctcctccatggtagtctgtgcagtgggagaaggcagcccgggcccagggtccacggagaagacgcaaatcgacagcgcgggagcgcggaccttctggaggcgcgcggcgcttaccgctgtccgtcctcgaagccccgccccggggctccgcctccgccggcgcgtgttcctttaggg

SEQ ID NO: 302 - DNA, 211 bp, Homo sapiens
ctccgggggccgagccaggcgcccggggctccccgcgttgccactgacaccccagcgagggccgcgcaaaaccgcggaaatgcccatgggcgaggtcgccccgctacccctcgggaaaaacacacgcacgcgctaacaacaacaaacccagtccggcaacaccctcgcagtcggtcccggagtgcggaggcccggcccggcccgccccgcg

SEQ ID NO: 303 - DNA, 135 bp, Homo sapiens
cccgctgcagccacgcctccctctcttctctcccacctgctccccattctgcgatgatgctgaaatccagacgcccgcagacccaggcggtggcagaactcctgggggccggtggagaaggaagcagctggccag

SEQ ID NO: 304 - DNA, 149 bp, Homo sapiens
gggccggctccgccctcacctcccggccgcggctgccctctgcccgggttgtccaagatggagggcgctccaccggggtcgctcgccctccggctcctgctgttcgtggcgctacccgcctccggctggctgacgacgggcgcccccga

SEQ ID NO: 305 - DNA, 142 bp, Homo sapiens
ggaacctggctcagtccacttccctgtcaggctcggcagacagggcagccatctgcgccagtgaactccgcccagggcggtgctgcaggggctgctgggaaccatgtgtggtcacccctgcgaggaaatgggacaccaggcc

SEQ ID NO: 306 - DNA, 585 bp, Homo sapiens
gcctcccctaccttcgttcgccaggtccgccattttacttccttaagccctcccacaaggccccgcgccggcccaggctcgcctgctttctgccagaaactcccgcgcgtgcgcacttaacaagccgactccgtgtgaggcggccagctcgcgcctgcgcgctgaatgccgcgcggaggcgagccccggatcgcctgccctgcagagcagcctgccctgacgagccgcgctcctagcacgcacctgcgcacgagccatctcccgcctccttttcccgccgactgagagggcggggaaagggccgggaagggcgcatgcgcagtggcagcgactaaggtttagtgaggcggcaccgcgcggcccgaggcgggtcttgaagcactcgttttcccactcgttttccggggttcccccgcggtgggacagtgagcagttcagggcgccgcagccgaggccttcctccaggtaaatcgccgggcctgcgggggcttcccacacgcgcgggcgggagacgcgttgcctcctacctcagtttacccgccttaggagccggtaccttcggcaaacgctttcctgaaaccacgg

SEQ ID NO: 307 - DNA, 203 bp, Homo sapiens
taaccttcagagctgcacaagcgccgggagctgtgggcacgtgaggagggcgagcgggtcctaggtgcgtagacccgtgggtggggggcggagcggaccggtggaggtgggcagagaccggcggcaagtcgacccacggctgtgggtggcttcctcctgttgctcagtatcagggagaggcgggggaggacattcattttttt

SEQ ID NO: 308 - DNA, 142 bp, Homo sapiens
accgcgtgccttctggaggctccagggaagagtctgtttccttcccttttccagcttgcacagctacttcccgacgcacggccgcctcccggaccttcagagccagcggcattgcacgtctacagccttcttcccaggccca

SEQ ID NO: 309 - DNA, 147 bp, Homo sapiens
ccgaccagcccggcgagacgcgagcgggcggccccgccagacagcgccacttgccggcgccgagagtggcccctcgccgcggtgagcccctcccgggatgcgaaagccatcgcctagtccccgccgcacccgcccgcccatcgtggg

SEQ ID NO: 310 - DNA, 381 bp, Homo sapiens
ggggacccgacccgcgctcgccgccgtttggggagcattgggacgacagcctccagcagcgcggagcgaacgcagagggaaactccgagcgagacggaaggaagccccagtgaggctgacggaagcgggtgggcgggcgggcggccgccggctggaagaggacgtggccccgccctatgcaaatgaggcctctccgtggggctcgctacttgggccagtcggagcgctggggagggtccgggctcctacaggattgggtgtcccggccgctccggaagacccgcctccatgcaaataacggcagaggacccgccttttatttaaattaatgtctcggaaagcgctgttcggccccattggcctccgggaggagaggctggg

SEQ ID NO: 311 - DNA, 140 bp, Homo sapiens
tgccgaggctgcactcgctcatctggaaaggcttcagccgcgcaagggtttcacctgccgcggccttcccgctccggccgtgcgcatctacccccgcccccaacacacaccccgggatcccgggagctggagacgggctc

SEQ ID NO: 312 - DNA, 249 bp, Homo sapiens
taaggcttgaggccgagaatgagatgtaaaaggactcctgaaaactacatttcccatgatgcccgtctccccacgcaaccgcggccgcgacgtcgctcccatggcaacccagaaggcctcactcccagactccttgcggagctcgccgcctgattctaggctggtcactactccgagcctgtgacgtttgcggcagccaggccgtcgacgatgcccaggtattccctgaacccggcttgcgtgggaaag

SEQ ID NO: 313 - DNA, 143 bp, Homo sapiens
gtgaccgaggacggagggcggcgcggacggcgccgtgttcgcagtgctcgaaatccccacgaccggcctcggacggcgaccccggccggcccagctcccactccaagcggggtgacgccagacgcccaggccccgggaccgcc

SEQ ID NO: 314 - DNA, 370 bp, Homo sapiens
agcccgagctcttcttcaccagctcaactccgtctccagcacctaagcagtatcctcccgccatccctccccacggcgcctgcgttccccggcaaccggcgccgctgggcagcctgggaggcaggaaaaagcgactcttcctctaacagtctccggaaaacggtgcgaagagaaggcgccaagacgccttccctccaatacactacaatacccaggacgctttgctacaatacctctccggggttggctggggggcgcctccagctgcgcaagcgcatagggatgcgccctttgtggactccattgcgcagggtgcattgccctgaagagcgctcctccttccggtgaaagtcgtcgggttcccagccgg

SEQ ID NO: 315 - DNA, 149 bp, Homo sapiens
aggctcaacagggcctgggacagttggggctgcattcgttggcggcagcggcccaggatgttggcggctgcgacgccgccggtgagggggagcgagagggggctcctggctcggccgcccccgcttctcctgagaccccccactgctag

SEQ ID NO: 316 - DNA, 155 bp, Homo sapiens
ggggggctccagcgccttcgcttccgtctcagccaagttgcgtggacccgctctttcgccaccttccccagccgccggccgaaccgccgctcccactgacgctgctttcgcttcacccgaaccggggctgcggggcccccgacgcggaaaggatg

SEQ ID NO: 317 - DNA, 210 bp, Homo sapiens
tctgggaaacgtagtcccgccggggccggctcttaaagggaacggcgggcagacgcgggctgggggggttgtcgcctctgccggcgcaaaccttacaaccttctccgtggggccggagttcagcgcgccgcaagatgctgggacacaaaggtggtaggcgaggatgcaatacaaatgatcagagctactccggattcagaaattgtgggg

SEQ ID NO: 318 - DNA, 153 bp, Homo sapiens
catggcttcctgaccgggtcgggcgggggtacccgggctgtttcttcctctgggtcttcctccgtcggttgagaacggtgtcccgggggccctcccagagagcagggactgccagggcaggccagggacccggcgagccgcggagggcggggc

SEQ ID NO: 319 - DNA, 316 bp, Homo sapiens
aaaaaatccacaaatctaggcctcgctgccccctccctgcctcctctggccctcctcagtgcccacgcaacccggttcgaaagagaggatgaccgtattctgcattttagaaaacaggctcttagcttcccccgcccccgtcctcactagagtggagaactgaaagcgaacgctataaagggcgccagtgagaggggctggcctcctcttgccacgaggtcagacggcgagttcttagagaaaaaggctgcttagctgctgcttatcatgtaacctcaaaaggaaactgatcgtctttctcatgctgtcacgtact

SEQ ID NO: 320 - DNA, 147 bp, Homo sapiens
ggctgatccgagccgagcgggccgtatctccttgtcggcgccgctgattcccggctctgcggaggcctctaggcagccgcgcagcttccgtgtttgctgcgcccgcactgcggtgagtgctgctccttccgggctcgggcggcgtgg

SEQ ID NO: 321 - DNA, 145 bp, Homo sapiens
gacaagttcttctacgccgggaccccgcctgcggggctggcggccgattcccacgtgaagatctgtcagcgcgcggagggtgctgagcgcttcgccaccctctacagcacccgggaccgcatccccgtgtactccgcgttccgcg

SEQ ID NO: 322 - DNA, 198 bp, Homo sapiens
tacccagaggcggggcttccccgccctcggacgctcattggctgggcgagacgcttctgggcgggccgcgcacgcctgcatctaggtcttggccccgcccctcccactggaaccccgccccttgggactccggccacgccccaggctctgagcaccgccctggggcggggtatttggcactttcggagggattcggtc

SEQ ID NO: 323 - DNA, 905 bp, Homo sapiens
ctgggcagcagaagagggaggggaacgctcccagccggcagccgctctgggcgtgcacccgccacgcgaagccagaggttggacgacgcagccggccaggcgcggctcccgggggaccccgaaaccgcctgtggctcaggccctacttggcaagaagagactggggagtgagaggaggggtcactcttgctctctcgcacaatagacttcccgcaggcgagtgcgaacggccttttgcttcctccttcttttccaggacccttagcgacaggagaggaagagaagcggcccggcggtttaattgccaatttcctgatgcagccacagggcccagcagcggctcagcctaggccaccgggtccaggcctctaggcaataggcccggcgccccctccaagcaccgtttcccgccgaccccgcagtcatcactgtgagctcgagagtatgggcagcctgtggtgccctgaggcgccgggcgctcggcgcatccgccgtgcccacagcgctgaggaccaactagggctgccctcggccaggggcactgtgcccgtttgagtggcactcggacctggcgaggggtggaagcccaggtagagctcgcgtctttaagagccacccgacagaactgcgcgctacatctgcgccagctgggctgggtgggaacagcgcagaaatactcccgtgccggggcgtacagggcaggtaggcccagcagagagtcttctcggaaagtttcccacaaaagaagggccgggcaggccgagcggcaggaaaagccggtgctcagcggcgaggcccgagaggtctggcatccggcggcctcccagctttgctcgggtctcccgccgcctctctccagagccgcccgtagctccgtggggcggagggcgcaatgccccgctctg

SEQ ID NO: 324 - DNA, 158 bp, Homo sapiens
ctcgctgttccctccttccctccctccctcccgcgcggcgtttggggtttgcggtgggggccggtcggggagaagcgtgagctggccgggcagggagggccgggggagacctggggccgtgcagaggcgggtgggttgagaggcgccgggcgtaggat

SEQ ID NO: 325 - DNA, 299 bp, Homo sapiens
gagtcagtctggtcgcccgcccagaagggccccacttcgcctctctcaggcctcagggacccgggccctagcgccccgcggcgacgccccccgcccccatccacgcacacccaccggcactgctgccgccatcctgcgtccccacgtggaggagaaagagcccggcagacagagcgccgtctccgtggtcgggcggggtcgccgccggccacatcgccctctgctgttggggaggagaagcgtcccgctgcgcacggcctcagggattagaaatgggcttacctggtgctcctcccgcc

SEQ ID NO: 326 - DNA, 248 bp, Homo sapiens
tccacaggaagggaaaggggcgggagcttggagggggcgggtccagaatggcgggagcttccggggccgccgcctctggaaggaaaaggggagggaacgtagagggggagggaacgtagagggggcgggaccaggaacgagagcgcgtgggtttctggggtgtccgccggcgccccctgggattggggagagagggaagggctgaggctcacggtttcggagtaaggggagcggcccggcgagccgcc

SEQ ID NO: 327 - DNA, 208 bp, Homo sapiens
cctgcagcgccggagagagggcaggaccggccgggtggatttggctgctcgtgcaggagctctgaaggggtccgctggcgggggaccctcggacttacccgagctggcactgcggacccctgcgaggttcatagaagcacggaagggggccaagtgcaatgaggatccaagggatgaataagcgaggaatgtagagaaagtgttcatc

SEQ ID NO: 328 - DNA, 136 bp, Homo sapiens
gctgaccgcctttccctgcctcggttcccgcggccgcgactcccgccgaccggcccgcccctgtcccggcctccctgcgcgccctgccccccacaaccctttgccgtcgctcctcggccggtcccctctgcggccc

SEQ ID NO: 329 - DNA, 293 bp, Homo sapiens
aggcgcccgcggagaaaaccagccacggagcaggggccgggcggcgaatggccgcgcccctcctggccctctgactcggcgattggccggccgtgctcgcactccacgacccaaatggctgttccagggcgctagtcaagcgggcgagttaggaaaacagcgaagaatgccgggactagtgaagcgggtaagggacgtgcggaatcgcggccccagcggctgccaggcatgatgggagttgtagtcggcgcggctgcaaggcatcaagggaaatgaagtctccacagatttaa

SEQ ID NO: 330 - DNA, 148 bp, Homo sapiens
ggggcggaggcgcggctccccggggttcgcggccctgggacaggggacttggggcctgggagtattcgagtccggggggttgggggcagaacggaaggctcagtaacctggaattttagggcctgggactgggagacttgtaggctgg

SEQ ID NO: 331 - DNA, 146 bp, Homo sapiens
agcctgctgaggtgccgccgacttcccgggctgctgcagggacgcagtgagcaaggaggcgtggatacgatacctaccgtatttggttctaatgtgcgagggtcgcgcggggggagactgggatttcactggggagaagcatccca

SEQ ID NO: 332 - DNA, 558 bp, Homo sapiens
gggccggaggaggcacctgcggccggtgggctccgggtgatgcgctacacccgggcggcgacagcgggagggaccgccgcctgggctgcggcttctatcccggccacccccacttccggctccggggactacagcccccggcgagcactccgaggctaggccgctcccgcaggacgcgtcctccaatcccaggccgcgctcgcagaccgcgcccctccaacggcaggccgctcccgcaagccgcgccctccaatcccaggccgctcccgcaggccgcgccctccaatcccaggccgcgctcgtggattactacgcacccggtggttggctgggccggcttgcaagcggcgggggaccttggtctcaggaatccgtgccggggcgtatccttattcacccccgtgacattacacgctggggaccgaactcagtccgagatgtagactaggcaataacgctaatctaatcccggtacgattaaccccactcagcccgccctggcttaatgtccgctggtggtgtttggagacctcgagcatttaaatgaagcgctcacaa

SEQ ID NO: 333 - DNA, 149 bp, Homo sapiens
tgtggtacggcccacaccattagagtggcggcgcgtgtgggcgcccgtcgcgttcctccgcccgttctcgccgggtcgcaccccccaccccgagggtgtacttggtacggcccgcgccgcctcctttcctcgcccgggtggccatcccc

SEQ ID NO: 334 - DNA, 146 bp, Homo sapiens
gtgtgccggccacaagcgcgtgcacaggcactcacgcgccgcggggcccctcgggcggctccagcacgccggcccgcgcggggaccctggcgcaccagacccccgcgcagcccgcgcctgtcctcctctcgctccgccgtgttttt

SEQ ID NO: 335 - DNA, 276 bp, Homo sapiens
gacgccggggcggcgctggacgaacttggctcaccactcgcgtgcctgttggtgggggagggggccagaggacagggcgcggcccaggccagttccacaggtggctctgactgcccatggtttcgcgcgagtggtgggcacgcttcggtttacctcccccgcgggtgacagcccagtgcttccaccacaaccgatgtcaactctcctagcgcccctccgctcaccggtaaaccaggacagtggaggggcgccctgatgcggtgaggcagggggcgg

SEQ ID NO: 336 - DNA, 144 bp, Homo sapiens
ccagagaagataattgccactcagtgatagagctcagaacggaattcacgttgtcagattcccaagcctgagtaccaaccaagatctggttggaaagagcaagtgctgtcgtctgagaacatccaccatattctgtactcttca

SEQ ID NO: 337 - DNA, 214 bp, Homo sapiens
ggtctcctgcacctctttagcttctccgctcggccccagatggagctcagttccctcaccccgcggctcctcgccggctgggcagccagagcctgcgccaccctttgccagcaggacagacggcccacctgtggctggccagcccatcctgtctcctgggtcctgcggtgggctcagagccacccttccgtttccgcttccccctgaccgagtc

SEQ ID NO: 338 - DNA, 255 bp, Homo sapiens
ctctgattagggcgggggcggggtcccggcggggcggggccaggtgcgccaggcttggggcggggcacctctggctgggcggggcggccgggccccggcgctctccagaccccggcgggtagctggcgctttgggaacctcagttgcctcggttggaaatggggctccccggcaggaccgaggtggccgcgtgccatctgcgcgagtccctgggtccctcgatgcgcgggggcgactgctgccaccgcggcctcc

SEQ ID NO: 339 - DNA, 168 bp, Homo sapiens
atcttggggcgggcgcgggagcgagctcggcgggcgcggcacttgccgcagcttcttgggggcctcaccctgcgggcggccctcggacctcggtgagccccgcggtccagccctcccagcagacacccctgcagccgactccctgggacccccgcctagcgcggcgcc

SEQ ID NO: 340 - DNA, 209 bp, Homo sapiens
gaagaggctggcaggtggcgccgtggggtgggtgctcctggtgagaggagtccactccgtgcgtgcgggcggaggccggcccccgagagccgccgacatgaagaaagacgtgcggatcctgctggtgggagaacgtgagtccgcaccctctggccggcccctgagtccctgccctccctgcccctgcagcccctgtcgcccctgtcgcc

SEQ ID NO: 341 - DNA, 1707 bp, Homo sapiens
aaatggcctctagtaaatccggagccggagccggcgaagccgcggagttgaggcgcgcctgggagagccaaggcccggcgggctatgcaggtgcatgcccccccctccgcccaaggagcggcgccaccagcgcttcccggctttgtccttggaccctggcaccggctcgctccagccgcgggggaaggcgcttcatcgccaaagtgcgctccggcggccccggcccgctctgcgggccgccgccggagggagtgcgggggcgccccgaagccgcccaggccgcactcgctggatgctgcgctccctctcccggcgtcggccgctccgggccggcggcagctgattgcggtcgtgagctcgcggagcggcgagagttaagaggaggtgttcgcggcgccttcgccctccccagacacacaccccctttctcctcgcctcttctcggagggtggaagagacaaaaacggggggtcagttctccagtccgccggctgccggcacgcggggcggcgctccgtccggcccccgaggaccagcggcgtggcggctgcgctcggacccggtccgccggccggaggagcgcgcggcgcccgcggtcgcgcccgcaccgcaggccccttcagagagtccgggggcgggcgcgggtccggcggcggcggcggccgcagcccccggcggcgcgcaaccgcccgtcgccgcccgccgctgcccggcccccggcgcgccgccggctccggctttgtgcggagggagcgagttcgcggcttcggctcccggcgccctcagtggccgcgccgccagcggactgctgcagcggcgtgagcagcgggggtcgcggctgcgggaaacgctccggagcccaggaacatagtccccgctggctagcggcggcagcagcagcagcggggcccctgcgcgcggcgcccaccgtctcctcctcgcgccgggctcgcggtgttgcaggcggcagccacgcagactgctctctcatccttttgtccttcagtcagaacgtgaatgtactgctgacgcatactgttctgggagaagattagcgtgatgcagtgctcttatgtattagcgccgctccccctccgtcgcctgcctcgcggggttaacgccggcgccttccagcgccgcgccggccggcgccgcgcagccccgcgcctccggccgcccgtcttcctctttcctccttccttcctcctctcttcctctctccccctcccccctcccccctccccgggccgcttcctccccgccccctctagacgagcggagcggggccagggcgagcgggcgagcgagccggagtgagcgtcaagtgaggggccgcgcgcaagtcgcaggcgttcgcagctattttgggccggtcggagggagcagttgggtggccgctgataggctggagcggcgcggggctgcggcgggagagcccgcgccggcccccgccctccggcccgcacccggggccccctggctctgaagagcggggctcaggggcccggcggcccgcggcggggctgctgcatttggcctgcctctcgcccggcccgcgtcatcctcacccccgctgactgctgacggggcgcggactcgcgttcggagttcggaactgcgtggtggggactcgggggacggcggccggggccacgaggctcccaggaccgagagcccgggcttcgctgctgcactgccgccagcccc

SEQ ID NO: 342 - DNA, 472 bp, Homo sapiens
ggcctgtctctcacctttcacggcccaagaccctgagcctggctaactcgctgctctgcccgaaccgcaggctgcctgggccggggacgcgcggaggggccccccgcagagggcgggctcagccgggcagagctctcgggggcgccccgcgcccagccccgccggctcctgctctccccgagcacgcggcgttagctaatcttctcagggactgccgaggccctttctccgccaaaccgcagggagggaacagcccgagaagggagggggctgggaagggtttgttgttgctttttctgaattaaaagaaaacagggactagagcaaggaagagagcgaagttcaagggagaatctggcaagtcaccttgggcagcccctggaccgccgccagagctctcttggagagggtgaggacgccgagcgtgtgatgagcgcctagtgagtattcactgtgcatgatagatgactgg

SEQ ID NO: 343 - DNA, 149 bp, Homo sapiens
agatagaagcacagggcaaaagtcaaacctggctgccttaccacgtgtcagtacgctaaatatctgtgtttttctgagttcatttctccactgttaagcaagcgctatacataaaaactcatgagtgtattcatgaaacttttatgcca

SEQ ID NO: 344 - DNA, 276 bp, Homo sapiens
ccccgagaggcgccgcgcgggccccgagtccttgctcgcctccggccccgccccgccgcccagcgctgacagcgcgcatccccgcccggccccgccattggtggaccgcagttgctagggcagctgcgcgctttcactggcttggttgtccgtccatcttactctcgtcaccgcctccgggctgtcgcccacccgcccctcctgaaaggtcgctgtcaccacagccaatggaggcccggagacggggcaggggcggagccagaacaagcaggaggc

SEQ ID NO: 345 - DNA, 136 bp, Homo sapiens
tgagcagaaagctttcaaccaaaattaaagatcgcaaccactcaaggattgggtcgaacggaggaacccacacgatggacgccgggtccctgcccccggtgggtctcggcgggccgagttctcgccctccagggaa

SEQ ID NO: 346 - DNA, 386 bp, Homo sapiens
gccctctaccgcatccctgacctgtgagtcacggagctcccgggcaccatgctggccacaaatgcctaaggagccccccggaaccagctgtgggtcccgcaggcactcgcaggctagcggacacctttggaggactgagagacctgtcctgcaatccaatgttcctcactctcacaagattttacagacgtggaaaccgaggcccgaggccccaaggggtaatcggcccgccttcccatgccaataaccggcagtggcgggacccacacctactccgtgacctgcaggcccaggggtcgagccccaggtagaacgtctagacggactccgcccttagcgccgtacggggaaccttctcccggacgcagacacggaagcggaagtgc

SEQ ID NO: 347 - DNA, 156 bp, Homo sapiens
ccggcggtcatcatttattcttggcgctaagctgccgcttctcttttttatcaccacagagtaacgcagaccccaccgtttccttccattctgagccaaccactccagcagccaccggggcgccaggttatgctggggctgcaccacccggcccga

SEQ ID NO: 348 - DNA, 146 bp, Homo sapiens
ccgggaggccagccgtgcgcagttaccgggctgcgcggtcccaacgcagcggcgagcgggaggcccgagcctgcgcaacgcaccgcccaccgccgtcggccctgcctcctctgccgtgcccccagttgcgggagcgagcgcggtcg

SEQ ID NO: 349 - DNA, 147 bp, Homo sapiens
cgtgggcgtcagggtcatccagccctcccctgagtctttgttggaggctggccgaggggtgtaagcggcgctcggggttctcctgagcgatgaaggctggccgggccttcgctccaacctgatcgttcctagctttggggccaggca

SEQ ID NO: 350 - DNA, 145 bp, Homo sapiens
ccacaggtcccgcccccagctccggcccggggctagtgcgtgttgacgtcatgctgcgtgcgggccggtgcggaatcgctccttcaactccgcggggcagtaggagttagttagcaaagagccgaggccgggcgcgcgaccctcg

SEQ ID NO: 351 - DNA, 148 bp, Homo sapiens
gcctctctctctgcgcccccttctctccgtgtcacgctccctcctggttctgcgcgtctacaaacttttgagcagaacacgagcctcggcaaacgagtcccgcagctcctcctgctgctcccgctggttcctgcggcttctgctcaga

SEQ ID NO: 352 - DNA, 178 bp, Homo sapiens
ctcgagtcggccttctcgaagacggcgctgagctggctgaccgtgggggacacggcgtcagcgtccagcttgtccagcgcctcggtgctgccgttgaagcgcaccacgacgtccagcttccggtcctgcaggccggcgcgctcctgcctcagcagccgccgcgccgcgctccttgtcg

SEQ ID NO: 353 - DNA, 248 bp, Homo sapiens
tgtttcgaggaacgcgccaaaaactgccaagggctgtgggaggtgtgttcttgcgtcatttccgagagacttccgcgccgcagtttccctgcttccccagctccagaacttccggccagcgcagccattttggcttcctgaccttgggctacggctgaccgttttttgtggtgtactccgtgccatcatgtccgtcctgacgccgctgctgctgcggggcttgacaggctcggcccggcggctcccag

SEQ ID NO: 354 - DNA, 161 bp, Homo sapiens
ggaagccgcctcagtgcccctgagggactccgggcaccccggccatgctgaaggaagggagggcgacttccccgccgcagatctggattcgctttgggaggatttctcccaaagtctcgcccgtggcaattcggagttgctggccttcctcaccagctccg

SEQ ID NO: 355 - DNA, 149 bp, Homo sapiens
tccttcgcgccccgggcgccccgctccgccgggaaggtgccgaggatcccgtcgtccttggtaaaccccaggatggcctcgatgctgtgaagtcgcgaggtgctcccgcccgggctgcggagcaggtggccggcaagcgagaagctccc

SEQ ID NO: 356 - DNA, 217 bp, Homo sapiens
ctctgggtgccgagagccgaagctggggttccggggcccgattctcagcgtgagcgatgggtgtggcgtctggagtggacgagggaggacactgaggggctgggtgtggcccggagagtcgggtgcgctgcgaggaatcccggaggggtgtttcctcaccctccagggtctggctgcgcattcctgagctctgatctcgggcgatggctggaggccc

SEQ ID NO: 357 - DNA, 1388 bp, Homo sapiens
aataaaaagaaaaggcctttgcagcgagaagtttggttggatgtgcaccagaaaaggaaaagtcagtttcttaaataaatccacccgaagtttcaactgcgaggtgccaggcccttcgcaaggaaacagggttttcgtttccaactcggtattcgcagctagtgacgagggtggcatttggggccccaatcctgtcaccctcgatcactacctgcattccatttccactcagcaacccccaaccccttcctggctatgtctaatgagctgtcggcctcttcatcttgcaagtcattcccatcttctattttgagtttagaagagggaaacccccaaaggggagctcgtactacaaactggaacagactgcttgaagggcgatgcacagggaacatcgaagatctgtgcctctcccttgagactctgggcatgccaagtcgaggaaggacagtaataaatgcatggacacccgtgaattccgagaagcattggctgcaatttgggcctcgggccctcccagatcccagttcctcaacctgggcgctttacctggacccggacctctggtaggttgaccttgccggccagctcctcgcggctgtacacgtccgggtagtgggacttctcgaacgcgcgctccagctcatgcagctggtacgtggtgaaagtcgtgcggttccgccgatgctttttcttgggctgttcctcctctgacagtttcgcttcgccggtggctggcccgacgggcagccctgggctcggccgtgcctccccgggctccttggggcagtagggtcgaggggctggggcgacgaggcccgggagggtcagatgcactccccaaaacacccttgggccgaccccgcctcgctgtgggcactggccagcccgcctgcgggctccgagatggcccggggaggtccgtggtgagggcggcgatgggtcctaagctttctctgaatgcaaattggaagctcccgccatagacggtccccaaccccgcgcccagttgccttaataaaagttaaggaaggggcgctctcgtctggccaactcctaagctcgggcgcccgaacggcctcgcacagccaggggtgcgcactcaccttcgtactcgggggcgggcgccggggctggcggcggggagggctcggagccttcctcgggcgccttggggcaggcgggccgcgcgcccagcctcctatcccgctccttcgcgccccgggcgccccgctccgccgggaaggtgccgaggatcccgtcgtccttggtaaaccccaggatggcctcgatgctgtgaagtcgcgaggtgctcccgcccgggctgcggagcaggtggccggcaagcgagaagctcccgtcggccatggctggcgcgcagcccggca

SEQ ID NO: 358 - DNA, 322 bp, Homo sapiens
gccgcccagtcctgcgctcgcacggccaccgccttcgtcgccgtccagtgggagatgcgagcattcggggctgaagccgttcgcaccgcctcctccatggagaagcgccgaggaaaacctgccaaggacaacctccggcaccgccgtcaccaccgctgccgggacctagggccggcgccggaaaacctaggcgcggctaaatgacgcaagaggcctcgcgcgcacgcgcagtgccgcaccacgtacaccccgcccccggggctctctcccgccgggttccggttcctttacaaggccccagtcggctgagcgcggagggcgg

SEQ ID NO: 359 - DNA, 155 bp, Homo sapiens
tctgcacagcgcgcggctcgcgccggttgctgggcagaagctcgagcagcttcgaggatgtcgggcctgggggcggggccgcgaggcagcgacgtcgcgcggggcgcggccctgacgcagcgtgacgcaccggcgccgcggcgggtacgggctcg

SEQ ID NO: 360 - DNA, 143 bp, Homo sapiens
caccaccccgaccgctagtggagcgcccgcgcaggcggggcctcggaggtggagggcggctttccggagctcctccgacggaggcccgtcccggaaggatccccgcgacccccgatcactccctccgtcttttcgccgctgtg

SEQ ID NO: 361 - DNA, 153 bp, Homo sapiens
gtctctggcgcggcggcggcgggcccagcgcgcagcggcagcggctgcaggcacaggcggtagaggacgctgtcgtgcacgtcgggcagcaggtagtcgcggcaggaggccccgaggagcacgcgctcgcacgggaagcgcgtgtaggcgccg

SEQ ID NO: 362 - DNA, 244 bp, Homo sapiens
gggtcggttggagttcgtgggtgggcgggtacagaagttgggctagttgtgtgggtcacagttgttcgtgctaggcctggggtctgtaagctgtgcgtgtgcgtgctgtatgcgtcggtgaaaaccctagggtttgtaaggcttgagcgatgggtccgggccagttatcctagcgctgttggttaattgcctggcgtgagtgtgtctgggtgcggtgtggggtgcatatgtgggaagcctccca

SEQ ID NO: 363 - DNA, 154 bp, Homo sapiens
gcaagccttaaggatccatcctcttcctcagcatcagcgctgacagcatcccgcaaattggcgccgtccccagaaccgcctaacgtgaagctaatcatctttgggggactggggaagggccttaggtgtgacgaggaaaggagatgggcacttc

SEQ ID NO: 364 - DNA, 142 bp, Homo sapiens
atgctggagaggcacacggtgatggacatggaaggacccgggaggtgtggagtggtgggcccggcccgtcgcgggaaggacacagagggacataggctgccctggagaggcgctttcggacatctggaggggcgcatagtgc

SEQ ID NO: 365 - DNA, 143 bp, Homo sapiens
gggagggttctcagtccacaagcgggggctcgattttggcttgggtggggtcctctccccatcgcggcgctccccgcccacgcccgcgcccccagactcaccctctccggggtacaggtggcccgcggcgcccagtagcagcg

SEQ ID NO: 366 - DNA, 143 bp, Homo sapiens
gggcctcagcgggccgcggacgcaggacagcaggacacgcagggcggccatggctctctggactcctcgcccggccccgcggagccgccccctcgcctatagcctttcagggctcgctccgcccacaggccagcgccgcgaga

SEQ ID NO: 367 - DNA, 156 bp, Homo sapiens
ccgcggggcgttcatgtctccgcgggcccggggctgagcgctgcggagccagaggacgggcggggcggggggctcgggcgccctcagctcggcctcagctccagcctgggtcgtccctgctgccgccgcgcccggctcgcctcgcgccgccgcctc

SEQ ID NO: 368 - DNA, 381 bp, Homo sapiens
gactgccactcttactcctcgccctgtagcagaaccccaacccccggcctgagactccagggatcggctgagctcgcgggctaacgctgtgaagcctgcccagctaccgtgacgtcacgagacccccgctatctcgttggtggctatttcctctcccgctgtggtccctggagacgccggaggagatttccgtgacaacggcaagctggctgcaacgaagccgcccacgtaggcctccccggcctgctggaggagaggggatcccccggggcagaggcggctacacccggagaacccggaaaccggaagcgcagatcctgccggctctggactagccgctcagcaccagggcggaaggaagacgaggcgaggcaagcgcca

SEQ ID NO: 369 - DNA, 157 bp, Homo sapiens
taccggcgtttgcctaatcactgaaatgtgctggcagtgcgctctagctctcagtagatccttatcggaactgtgcgtgccaagctgccagccccgagaaagacaaagaacacgggcgcctccaggtttgcttctgaggcctcagggtcacctctgg

SEQ ID NO: 370 - DNA, 145 bp, Homo sapiens
gcatctcctgcgtgctggcgacaggctgcgggggcggagtggtgccagggcgggcgctcgcccgtcggatatgcccacccgtcccgtccagggcaggaaagcctgccagggcgccatccccatccccaccgcctccaggctgccg

SEQ ID NO: 371 - DNA, 282 bp, Homo sapiens
cgggccagggcgagcgggtcacgtgcggccgggagaggcgccgcgggccgggagtgtgcaggaatgtagcaacttgcagcgaaaagtttccctgcgctgccggccgggccgcggtgcgggcgggcgcgcagaggaaggaagagccgagaggaggcggggccgcggcggcgcgggcgggcgcttctcctaactttagttttggcgtttgaggcgagtttctgtctcagtcgggcgcagccgccgccagggaaaagaaagggaggaaggaaggaacaagaaaag

SEQ ID NO: 372 - DNA, 159 bp, Homo sapiens
cggttggagacaggcggcaggagagctcctcagaaacccggcaggtttttagcgccgcgggtgggggaacgaggtccccgtgtcgcgtgattcaagaggcgaaggaagcattggagccgggactcacggtcagacaaaggggcgactgcagtgcttccc

SEQ ID NO: 373 - DNA, 148 bp, Homo sapiens
tagctgcgtgcgggtcctcccaggcccggggtgttggcgccccgcccacagcccagtccttgctgcccagccctaccttcgcgcagctgccgccaagcctggccacccaccccgtgcaccccgtggacgcccccagccacgggactcg

SEQ ID NO: 374 - DNA, 772 bp, Homo sapiens
gccccttaaagcagaaggctccctccctcggcatcagtgcaggctctcccacctcattactgttctgtgtctttgggaatcgtagagtctgtggcccccacgtcctaggtgtctcggcaccctggacccaggcgcctccgagattctatatcgcttctgacccctaccttcaagcctggcaggctccccgcggaaccctgctgagacccggagacaatcgggccgtgcttctccctcctccacgaacagccacggtttatttggagcggccggggccggcggcctgacaactggtaaatccgtttcgttaggcacaatttgtctgcaatttgtcagcccggctgggaaacgctccccagacgcctcggctgccgcacgggccctacctggttctcgaatcctgcctgctcataaacgaatcctagcacggggtgcctgcgtagacctggagctcaccaccagatgttcccgacctcgggagaggaggctttttccaaaacaacgaatttccttccttgttttccggtaaaggagcgttcgccacacacggggtccctgaacgcggggcctttcccctcgtggttggagcaacgcggagttcaagcctggccgccacagaataattttaaatgccccgttttcagacagatccagaacgccgtctacgcctaccggcggcagatcttcaagcccgcggcggccccattcttattgaaatcccactaaacggattccgactccggcttggggcggggggagacttccagacccg

SEQ ID NO: 375 - DNA, 295 bp, Homo sapiens
tccagctgctcaccctgagttcccgctggatactggggggctccgggccccttgctctgatggtacagcttcccccgcccgatgtcccagccccacgactcgctgttgctgcccagcagcgccgcgtagtggtcagtctgcagcggggcgagggccgtggccacgcccaccacggcatgcgtgcccctctgctctaggggccagctgatctcccaggcgtgcaggccccttgaatagcccctcttaccccgggccccatcagtgctctgggccacgggccgccgctcaaagtaca

SEQ ID NO: 376 - DNA, 146 bp, Homo sapiens
ggagccgagtctgggacggacaggccactccttaccctccccgcggaatcgcaactcacccgccacccccactccaaacggacccagaacttcagccccgcgccgacggactcaggacaggcctcctctccggtcggcgctgggac

SEQ ID NO: 377 - DNA, 155 bp, Homo sapiens
acggtgcggctcctctcggacctggagctgtggggagaaggcagccttttagtgaggagccgccgcgtggcgggacgcaaggaaaaccacccgagccgctgaacagtattccgcgactgcactccagggcaccgggaccgccagggtgaggaggg

SEQ ID NO: 378 - DNA, 142 bp, Homo sapiens
cgcgcgcgtgtgtgtgcgactgtgagtgtgccagtgcgtgcgcaagccccgagacaatgcgtgtctccagttcgcgctgcggacactgatcatgctgcattaaggaaaaaaaaagagagagagagagaaaattacatttggg

SEQ ID NO: 379 - DNA, 146 bp, Homo sapiens
ggaagacaaattatttttttacagtatcagacacgcggtttcctgtctatgtttaacttgctagcagaacatctcagccagctggttccctctggacccattgtgtccttaatgtcgttgctttacaccatccagcaaacccactc

SEQ ID NO: 380 - DNA, 243 bp, Homo sapiens
aaggaggccgcgggtccctgtcgcctccaggccaggcaatccactccaggctcgcaatccaccgacctggagttcacggcctccgccctcctggcccagcggcccccacccgaccccacccgaccccacccgacccaggccggttccggtcacgccggaagcacgtggccccccaccctgcggcgttgcccgggagaccagggttgtttaccagcaggacagagcccgggcgcaggcggcgga

SEQ ID NO: 381 - DNA, 152 bp, Homo sapiens
gctgcggcccgcgcgccccaggcctgctcgcattcctgcttgtggcccgcgcaggggcggggtcggaaggtctaggccgggcgcggagcgaggaagcgggtggcgctgggacgcatgctctgggggagatgagtataatgacccgcgtttgt

SEQ ID NO: 382 - DNA, 151 bp, Homo sapiens
cgaggctcccgggaccaaacgccgcccgacagccacgcagaacagacgcggcagtgcgacgcctcccccactggggacacgagacagcgacagccacgcggtgagccggtacaaggccctctaggcttcagcgggtctggatactcggtgg

SEQ ID NO: 383 - DNA, 245 bp, Homo sapiens
gccgcggccccggctctcagtcgccgccgccgctccgcgcgttcgtgtcctgccctggcctcagaggcggcccggcgccggcgaaaagttcctcggaaactgggttcccccggccgcagctctgctgggcggtcgaggcggaggcggggcctttcggggaggacccgccctcccagatagacggccccgccccaccttgagagagcgggggacccctgatccccggtctgcgccacaaatctccc

SEQ ID NO: 384 - DNA, 549 bp, Homo sapiens
aggcttgccatggactggctcctgggcgttagatgaatgaatcgactcaacccgggccgccacgttgtgttcagaacaccgacagtcgctcccaggcaaccagcacctgctgcgccccgtttccagcgacctccccaaccgcgtggactcgcatccacgtgcccggcggggccgcagcagaaaggctcggaccccccaggacgatcggccggtgggggccggtggggccgcagactcggggggcggggggcgccaggcttccgggtcctgcccccgccccgtggggaacagcaggacggcgccgaggccgtttcgctttcctccgcgcccatttgccgggaggggaccccgtgctccgacctgaaggtgacggcagagcctgcgggaggcctaggccggtcccgccctacgggtcccgggggcgaccctcgcgctgacattggcgtccaggccgcggcccctgcctccgcgcccacccacgccgggcctggccctcgctcccccgggaaaagccccgccggcggccgcgagagcgcggaagcgcagccg

SEQ ID NO: 385 - DNA, 131 bp, Homo sapiens
gcagcagtagcagcagcagtagcatgtgtcgggttggaggtgccagggttgctgaggtaagtctgttcctcagggttcttctctcaggaactgagaactcaagatttcgaggaagccgcacaggaagttgg

SEQ ID NO: 386 - DNA, 139 bp, Homo sapiens
aaaatgacggccagccggcaagcccggagccgcacgctcgcgtcagggccggcctttccataccaaggggcggcacgtgcggcaccgcctcccgcccaggccccaccccgcatgccgagcttggcccaacctctcctcc

SEQ ID NO: 387 - DNA, 150 bp, Homo sapiens
ggcagtggaggaaggtacgaggagccagccttcggtggatttattgaacgtttcgtctgcgttggtgaccgggaacagcagcccagttgctcgttcatctggagagttgggatttgggtgttccggccccgcagatcagtgccctctcac

SEQ ID NO: 388 - DNA, 144 bp, Homo sapiens
gacttcgccagattttcaaagcgggctgccagccccgggccactgccacggccgccccgggcccccacccccggacccctcgtttatgcgctcggattacagcgcctgttgacgcactgtagcggccgcctgcgcgccagcggg

SEQ ID NO: 389 - DNA, 141 bp, Homo sapiens
ggcgggccggcgggggcggcctgtcagccgctgctttgtctccttagctcgggtcccttctgcgctgccgcagggaggccgcccgggccaggcgagccgaaccaatgctggacctggaggtagtgcccgaacgctctctgg

SEQ ID NO: 390 - DNA, 221 bp, Homo sapiens
cgagcaagccgaaagcagtcgagaccccgcgagcccgccccttcggccgctagggagcgacgaactacttccggcgtccgcggaccaactctcgcgacagccagctcaaagcaggcaagaaccggaaggggcggggacgttccccgtgagccttcgcggtgctggctgctcatctgcatacggaagttcggcacattatgaattatttattttcctcgagg

SEQ ID NO: 391 - DNA, 256 bp, Homo sapiens
ccgaaggagtgaaagacgaagccccggcgaggaaggtgggcggaggcggcggcggcggcggctgtcagctcgcgttcccctgctcacagcgctgccattactgtgcgccgaggccgcctccccggccggccgccgccaccggccccggagacgcggggggtggggagcgaagcccggggagcccgcgcgccgacactcacctgtctccgcgaggaaagacagcaaagtccaaggccgccgccgctccccggcggga

SEQ ID NO: 392 - DNA, 152 bp, Homo sapiens
aaaggagaaaattggggaatgcaacaggatctgcaattcgggtgggggcggatggacgcggatggacggcccgcctggatccgcgcgaggcgccactcggggagttgatctgcggtctcgcagtgacacctacaggccgccgtggccgcgca

SEQ ID NO: 393 - DNA, 569 bp, Homo sapiens
ggtgagactggaagccagctccagattccgatttgaatgatgtgtgacgctgtctcttccctcaggtagacagcatacaccttccgagctccctggcctcggccataattgccagccgctcctctgggttgggcctaagagcagccggctcccggaccgcggtggcgcaggcgggctctgcggcgagccggggagagcgcggctgccggagaaatatgctaatggcggcctctccggcacagtcctggatttggtctaggctttctggcttggccctggaactctcagcaaggacgggtcgagtacccaagccgtggagaaagcccaggaagggcacgtgctaggatctcacacctgacccgcggcagaggctgctcgggggtcagacctggcgctggcgtttctttctgctcttccgcctgtgttcgggtagccacaggcttcccagaggcctggagctggtcgcccatatgcgcgtgagtgctcatctcccagtcacaactgttggcaaaccgactactacagccgtcgagttcacacttgaactggtttacgcctggaaatagaaa

SEQ ID NO: 394 - DNA, 462 bp, Homo sapiens
gagccccagtgcagcagaagtccggctgcgggttcaccttgtcctccggcacagggcccggccaccaggcgccacgctggatagcctgcggccctcgcagggtccttcaggcgctccctgggcagccctgctcggggtcctagtccggttgcgccgcggcgtgaggtgaggtgtgagttgccctggagggtggcgggttttccaggcgcatgcatttgccgcggacgggacgagaggatgaagccgttctgggcgccggaactcgcttgtgggaaccgcccctcggaagccggcctgggcgccctcggaagccggcctgggcgccctcggcgggagggagtgctgggccgggtgctggcgcagcgctacgcagggtggcggaacccagaggaccggacgggctcgttcagggtggcggcccggcgggggcgatgcccgccagcagagacaccgatggaaacc

SEQ ID NO: 395 - DNA, 455 bp, Homo sapiens
tcttggccagctcaggggagcatagtcggaaatcttcggttgtattcctgactcagcctgggtgcggagcgagcgcggacaggaaccgagatgcaaaggcggacgcaaccagcgcacccgcagacggcgcgcggcaagaaccaccttctagccctgagcctgcggtgccgggcgggctcaggaggctagtggggtattgtgatcactgggacatcaggatgaaggggtcactccaatcccttggagatcagattctcggggactccatggccagacccgaacggcgcccttcacatggtgggtggagagggtactccttggccgaattgacccctccctgtcccgcagggtcagccccgcgcccacccacacatccagtctccgggaacaaaactctgtctggatctacactgacccgttgacgcgctttcccaaaggaggaacgacaccaacaa

SEQ ID NO: 396 - DNA, 143 bp, Homo sapiens
tgtccatggtgccggccggagcgggcgcctgcatggtggggagggagggagctggctaagaccccgcccctctagaccccgccctcagggagtcagacgccgtcaggagcgggacaacgcctcaactcagttccttcccctgg

SEQ ID NO: 397 - DNA, 142 bp, Homo sapiens
tccccgcagcccgcaggccccacggacccaggagaggccggcgcggagcctggggcggactaacagcagagggcgccatagagcaggccgcgcccggcaggtgcggcccccgcgcccgggtgaagtccgctggccgggagca

SEQ ID NO: 398 - DNA, 159 bp, Homo sapiens
tccgcagcaggcgccccgctgcagatgccgcggcagctgctgcaggtgtggctgcggctgagcgggcagcagtggccgcggagccccggggccgggagcagaggagaagccgccgggggaacccgcagccgctcgccgcacgctgctgccgctacccgg

SEQ ID NO: 399 - DNA, 140 bp, Homo sapiens
caagtccacgtgctgggggagtgtcatgaactgacgtgcggtgcagccagtgactaggcgttgtcggtgcgcggcggcggggcgaagcctcgcgaggggtgggagcccgcgctgcggggcgtcactcacctgcggcctgg

SEQ ID NO: 400 - DNA, 137 bp, Homo sapiens
cagagggaagcgggccccccgagtgggcggggtcaccccacctgtggcggacagggcagcgaggccacggtgcgccccctcgcggctctcccagagctccggcgacgtagggcccgagaccctggagtggggaccgg

SEQ ID NO: 401 - DNA, 154 bp, Homo sapiens
ccttggaacgggacgcggggagacagggcaggatcagggagcccgccaaggcccctcgccctctcgttcggcccggggccgtgggcagcactcaccgatgaggttgggcacgaacaggaagatattttcgtctggcatcgcggcgcctcccttg

SEQ ID NO: 402 - DNA, 140 bp, Homo sapiens
gggcccttcctttgcctggcgtcaccctgccgccgacagtcactttaccccaagggccaagggtcccctggggacccagcagcagggacaccacctggctgctttgagaggtcaaaccccggacaggacctgtccactcc

SEQ ID NO: 403 - DNA, 280 bp, Homo sapiens
aaagagtgcttttccccaacacacgtcaacgtcttcctctggctcccatctaagacacatgaggggagtttgttttttacaatgtgacacacgggaccacgtaagggacctgcaggctgggagtcctgcaggcaccagccccgcgcgcactctgccttagatcaaagctgtgtcaagcagcacagccccgggagataagaatctgaggtccctgcgatcgcagcgttgagattttccactaaaaatatttaccgaattttgagaaaatctgcttcatgca

SEQ ID NO: 404 - DNA, 862 bp, Homo sapiens
gcgccctggcgtcttgctcgcgtctgagcgtgagcagagtgtgtgtacatctttgggccgtttgcagtcacgcgtgtgcacatggcgtgcacgtatgtgtgcgagtccccacgcgtttgtctcccatcggcgtgtgtgcacatagtgtgcgctatatgcctgcctgcccgcccgctctgtggtcccgagtcgggggaccccgcaccccccgggcaagggaaggatttccgagtccctggccttgcctgcaggagcctctctccgcagcctccacggagcgcgcggcgctgctcggctgccaggacctgctgaggacaaacggtgtgtgcagagccgggcgcctgggcgcccggggcgtgtgcggcgggagcgtctgagaccccagagatggagtcctgggtgcgtgggggccctgtggtccctgagtctggccacggggtgtggaagggagtcccctgagtcctcccaagtgacccggcgggcatgcgttttgggatgggggtcgttccagcctcgaagcagacggcggcgctgggtgccctggaggaggaggtgggagcctgccacagctgctgtgagggggcgcggcccagactatgggcgcaagggtggggtcttgtggccgggatgggaggggggccggaggcgaggcctgcggcgagtggggcggcggggggctggtctccgaagtcccgccccatcctcgcctccctcgcccctctcaccccgcggctcccaggctcggggacgcaggcgctgctgcagaccacgagcgcggagcttggggaggcgcaggcgaagctgatggagcaggagagagccctgcgggaactgcgtgagcgcggtgagggcccgacgcgac

SEQ ID NO: 405 - DNA, 148 bp, Homo sapiens
ctcccggcccggcctcgcccccgggtcccactcaccgaggccgcagacctcgcggcgcaggctaagacggccgcgctcctccgctatggcacgcagcatgtgctgcagcgagcgctcctcggcctcggcgccgcccgcaggctcgggg

SEQ ID NO: 406 - DNA, 283 bp, Homo sapiens
cgccaggcctcggaaatggggtcacgttcatgtaagtcagttaaaaataaaccccaatctctccagcagcaaggttggacgtatggggccaagaagcctcgctgccagcactaaagatggcgcgccggagtgggggtgggggtgttgggggaggcggggcgtgcgcgcgttctgattggccgaccggggagtgacgtcacgtgtcggccgccgagcatccgggctcccggcagcggcgctgcggcggctcgcgggagacgctgcgcgcggggctagcgggcgg

SEQ ID NO: 407 - DNA, 163 bp, Homo sapiens
ccgctccacctgcggggcgcgtgaccgtgagtgtgcgcgaccgtgtgtgagtgcgcggggggggacgctgctggatctgcgggggtgggggagcgcacctgcgcacaggctccgcgagctgcgccgtgcgtgggacccgaaatggctcactcgcaagaacggg

SEQ ID NO: 408 - DNA, 255 bp, Homo sapiens
cctgtctcgtccggacggcagccgcgccccctcgatgcctgctggctagctcgctcgctcaggcctggccggcacccctcgagcacagcgcacttggcctgtggaacgcccagcccgcctgcgccccctttatacgcgcgggccccacccccgtgcgcgcgggcccggccgcgattagcataatgtagtattttcagtttcaacaacaccacggcgattggcggccgccccgctgccccgccccgccgcggcccg

SEQ ID NO: 409 - DNA, 172 bp, Homo sapiens
tatgggaaataggaggagcgactgttcctaggtaattcgtggctacagtggacactttgaagtctgggggacgcgaaggtaatgaaacctgaagagcgcacaatctcacacgatcgacgcctctgggctcaaacaggaggaagaaggacgcatgcgtcacgcgcacgccagg

SEQ ID NO: 410 - DNA, 152 bp, Homo sapiens
tggtgtaatggttagcactctggactttgaatccagcaatccgagttcgaatctcggtgggacctttcaaaggtgaacgttttacagttcctggcttggcctctgaatgtgggaaaaattcgttcctccgcttcccatcgaattctcgtcga

SEQ ID NO: 411 - DNA, 142 bp, Homo sapiens
ccgcgctgcagctcacaggcagcgaaaaagtcgctctgcggaagccctggagaacttctggaaggagttctcaggcccgcgctacttttgtagtgcaggaagcaggcggggcgcggagaggaggtagaaacgcggagctcct

SEQ ID NO: 412 - DNA, 292 bp, Homo sapiens
gggggagttggttacttttaggttgcatgaagaggcggggcctcgcggggcggagctgggggtggtctgtgggtccgcgcgggcttcgggtagttcctgggtccggggagcagacgatccgctagccacattaggcgctcggtctctgcgtccgcccctcccgtgcctcagagacttgcgctccccaggcccgagcccctgtcggcccatcctcgagcccgtgtggctcgcgaacctctaactccagccgctgcagccccctcccaggcccggcgtccccgagccccgcggg

SEQ ID NO: 413 - DNA, 217 bp, Homo sapiens
gctggctctcggtgtgtgcccttcggatggtctgctgaagagggccgccagctggtaagacactccgaggcaacgaccggtctccctctccctagcccggtgtgcagtctgacccagcccccacagcagaccacccccagaccgggcgcccgagtctgcggaccgctctaccgcacctggttctggctctgggccccgggccccgtggctgccaggg

SEQ ID NO: 414 - DNA, 165 bp, Homo sapiens
agtcctctagacaggcgctcctcgcagcaccgtagtgcgcttgcgctgagcagcccgcgagggcggaagtgggagctgcgaccgcgctccctgtgaggtgggcaagcggcgaaatggcgccctccgggagtcttgcagttcccctggcagtcctggtgctgttgc

SEQ ID NO: 415 - DNA, 144 bp, Homo sapiens
cgaccgcacagagcaggaagggcaggtggccgggtgggacgcgccccggccggtcccccagcgccccctccgctgcgcgcacccgcgcgcacacacgtgcaggcgcactccccacccgccgccatccctccttacctcgcaggc

SEQ ID NO: 416 - DNA, 144 bp, Homo sapiens
ccaactcctggctgcattccgccaacatttagtgggcgccgactgggtgtccgggcccgggtggacagcaacctcccgccgcggcccaccgtgcgcccccgccagccagcccgggcagcgcctcccagaacccgcagaggcccg

SEQ ID NO: 417 - DNA, 178 bp, Homo sapiens
gcccggccaagctggggcagccccgggccagccccctccccggacccgcctcgtctccgggaccgccccgctcgccccgctcgccccgctcctgggcgcaccctcccgggacgcctgctccgcccatctccggaccccgacccgccccgatcccttccggggatcgtcccctcactta

SEQ ID NO: 418 - DNA, 140 bp, Homo sapiens
tatacaaccagcggcgtcctggcggaggagtcactgtggacttccccggagcgttgtcactgccatccctcccgcggtgaatcacaggtcggcctcaggtgcgcgcagcacacacccggagcagccgcgggtttatttat

SEQ ID NO: 419 - DNA, 146 bp, Homo sapiens
aaggggcctcatccttccgggcggggccgtatggccgccctcgggctctgcagccgtgactcagctcgggaaggttggcgctcaggcctggagcccggggctgtgcgggcaccaaacaaagcagcgctcgcacgcgccctcccagg

SEQ ID NO: 420 - DNA, 384 bp, Homo sapiens
cctgttacgcgccgtgcccccggaggtgcggccgctgggaccagcgccggccctggctccattcgggtcgcccagcccggccaggactggcctcccgcttccagccgctgccggcaccctcagccgtctggcctcccgcggaaaggcgggcgcgaggcatcctgggagtcgcagtcggcggtcgactcacccgccctcacagaggaggtggggacgccatgaagaactacagctcccagggagccgcgcgcggcagttggcggggccgggcttctgccggcggcgggcacgttgctaggagctgccccaacgcctctccgggaagagggcgccaggctcaaaggccctcttgggaactgccgggaagcttaaaagttcctcctg

SEQ ID NO: 421 - DNA, 146 bp, Homo sapiens
ggggagagcggagggccccgccccgtccagcgggcgcgccgcggggcagcccaatggccgcgagggggagggcgaggggcgaagccgaacctcccgccttgggcgccggtgcctgcgattctcgaaaccagcccgactcccagcga

SEQ ID NO: 422 - DNA, 923 bp, Homo sapiens
cagcacccgccttgtgctcaccccgccgggatacacggggacggttcctttccaaggaggcccggggccgcctctgcgccgggacagcctgggaagccgcgcaggcctggccgacttccccttcccagccccgctgcgccctgcggggccctgtcggcggtgggggctgcggacccgggagcgcgcggccgcgctgcacgtgcagggaccggtaggcgccggggtcagcgccagcgtttgatgtgcggcggggagcgggccgagccccgggaggccgcttcgcacctcccagtgtgtccgggttgagcgcgaggtcaggaggggacgcagagttcacggcgaagacggatcgcgggggctcgtcccgcccgggttgcgcgcagcgggggccgcgtgatggatgggccgggccgggcacccgggaacccgcgagcgcggggctgggctctgggctgcgtccgggggccccgacttggttattgatcggcccaagcgcaggagaactgactctataatgcatcgcctgaccaggaaaagtgtttgcttttgtgggagcaaaagacaactttctgccccgccagagcgttgctaagtgagcggtaatgaccacgctagaaatttcatagggagaggctaatggcaggctgactctaaaagtgcttttaagtgcaacttctgtctaatcccttgagggggaagaaaacatcggcgactaagaaagttcaagttgtacaggacccgggtttttggggtcggggtcacttctgctctgcgtgactttgaagaggaagacctgcggttttttccagtggattttcacacgtgttttaaagagaactcccggctcctgaaatgaaaggcccgcctgtagggttttgctgcctcccctctgcccacgccccacccccacagcctggatcaaa

SEQ ID NO: 423 - DNA, 389 bp, Homo sapiens
taatgctgcctctctttggtgtgactggttatactttgtcttcttcatacggagtggttccgttttgcgcctaggggcgtaacccgcccgggagggaatctggctgcggcggaccagggggcgcggctcgggatgcctgcgcgaaccctcgggggctggtggggaggtgtcagtggcaggtgtttcgtggtgctaccggacaggcagaatgaccgacctcgccgggcgaccgctcccagccgcgagaatcctgtattcgtttatctgggagtgaccatcctcgctactcagctactcacgtgaggctccagcgttcacacaacgcgaaccctcaaccactatggacgtggaagtaaaagccccttcagagtttgttgtagcccagacag

SEQ ID NO: 424 - DNA, 282 bp, Homo sapiens
gccccgccccgcctccgggtgttgctctggagttgcgggggccacgggcgggccaccgaggagctggcgcgcggtattgatccgtcccgccgccccaagcctctcctgaggcctccctctggcgtcccccgggatccggaggcccctgggacccggcgcggggaggaaaagtgggagtcttgacccctccgccccctacgcacccacgcgcacactcaggctcgcctctcgcgccccgcttcccctgcaaggctccgaggccgccgtgccaccacctcgccc

SEQ ID NO: 425 - DNA, 318 bp, Homo sapiens
caccacttgctgtccctcaaaaagccgactcacccctttccaagcgcagtgaaccgtccgcaaagcacgaggccggttgcgagctgcagaaagcccacgctcgccagcgggacccaaggaacgctagaactatacgtcccagaacacttagctttgtttttaactacggtgcagccgcaaaagggaaataccggctcaggacccaggggagttgtagttctctaatccaaagaaatcattatttggcaacgtacggttttcagggggatataccccgcgactgcgttcctgtaggatgtgagacaaagagaataaata

SEQ ID NO: 426 - DNA, 160 bp, Homo sapiens
cggggcccttcatctgcggcgggtggagagcgggggcgccaagagtgctgaggagtcggagtgtgtgagtgcgcgcaggcggggcggggtggggaccgggcggcgagccggccgggggcggggtgtaggtgatgctaggtagtctgtgagttgatagtag

SEQ ID NO: 427 - DNA, 133 bp, Homo sapiens
gcggccgccgcctcctcctccttcccctcctcctggcttcattcaccctcccagcagccgcgcagccgttcactcccggctcagggcagcgcctgccgcggctcctcgtctcctgccgcgggtgctggcgggg

SEQ ID NO: 428 - DNA, 311 bp, Homo sapiens
ggcccagcccggataagccaccgagggcgctggggagacctgcaccaggtccctggcctaggaggcggcggcctccccccgcctctccgcccgggcgccccggactgcgagctgtgcggtgtggggcgcgggggtctggctcacctggaggtgacgagcaccgccggggactgcatgacggcggcggggactccgggcggggcgcgcagtcacgggacccggcagtgcccgcgtcaccgcgtccccgccctgcctcccgctgccctggcctgccccctggtggcagcggccgcgcagttcgcgcctgtggc

SEQ ID NO: 429 - DNA, 258 bp, Homo sapiens
agaccggagagtcacgagggctgggccgccgagagcaggagaatataccgtgtcacacacctccattctctcacacacgttgcagacacaaatcactgacggtttccacgtgctgcgctcgtgagcggaggtgttcaaagagggggcagatgagttacttcccgagacggaaccgggggtcccacgtccgccgccttcagtagcacaaccaatctctgaacactcaaaccgcgcatctctggcgcatcaccatcctat

SEQ ID NO: 430 - DNA, 162 bp, Homo sapiens
ctgctgccgcctgggccccgccgagcggagctagcgccgcgcgcagagcacacgctcgcgctccagctcccctcctgcgcggttcatgactgtgtcccctgaccgcagcctctgcgagcccccgccgcaggaccacggcccgctccccgccgccgcgagggc

SEQ ID NO: 431 - DNA, 146 bp, Homo sapiens
gtcgcacgcatcgccccggccgtcctggtctgtgtccttttggtcgtcgttcttctgggaccggcagttgtcgcacgcatcgccccacttgtcctcgtccgtgttgcgctggtctgggttccgcaccagcgggcagttgtcctgga

SEQ ID NO: 432 - DNA, 146 bp, Homo sapiens
cggactcattaatagggagtcatttgtgactcaggtgcgctctctgcgtctgcaagtcacgttcccttcggcacgcccatctcgaggattcatcctctccaacgggtgacgagcaccgcctgccggcggcccgcctctcggcctct

SEQ ID NO: 433 - DNA, 278 bp, Homo sapiens
ccgccctagggaagagggagggacgcgggcgctggcgtggaggttgggggagcctgagaggctcgggcgctgggtgcgcgggagggagcgtgcgtgcttggcgcgaaggctcctggcgcaggcgacccggctgccccgccgagcggtggctttccggaggggtggggcggccgcctcgggtcctgacgtcgggcgccctccggccgtcactcagcgctcggccccgccccgccgcggctgcagcagcagcgccgcggccggaggagctaccgccgcca

SEQ ID NO: 434 - DNA, 140 bp, Homo sapiens
cattgccacctgctggagaagagaagacgtgcagccagacacctgccgccttgtcaggcctgtgtcgccgcctccgcagcccgaaatcatcctgccctccaaggcaccgccctgatgctccaggtgaaggctgaagaatg

SEQ ID NO: 435 - DNA, 142 bp, Homo sapiens
gggcgggtgggcgggggagtggggaggtgccggagcccggtgcccccgggagcatctcctctacctgagcgccacatggcgaccacgcgcagttttcccaccttgcggatggagagatttgtctcagccagagagatccaga

SEQ ID NO: 436 - DNA, 249 bp, Homo sapiens
cccgcggtagcccgggcgccgatatgtaaagcagctggcagcgctgggcggggcctgggcgcgatgcaaatgaggagggcggggctggcccggggctccgcctccctcccccgcagctggggccagcggtgccaagcgcagctggacgagcggcagcagctgggcgagtgacagccccggctccgcgcgccgcggccgccagagccggcgcaggggaagcgcccgcggccccgggtgcagcagcggccg

SEQ ID NO: 437 - DNA, 277 bp, Homo sapiens
aggccaaaagcgtcacaatcccggttcgagaggaacccgggttccgtcccagcgctgatctctgcaggggcggggctgcgtgtgcggcgtcatgacgtaagcgcacgccggcgcgccggaggggaggaatgcggcaggcggaaaacttaggaagagctggatgcctcccacggagagcgtcccttccaagcggccccggagtggagtggagtggagtggataggggtagacttttcacacggggacaaattattacaggatatctgcgccccctgtt

SEQ ID NO: 438 - DNA, 214 bp, Homo sapiens
cactgggatctcgcgtttcttcttttcttcgcgtttgcgagggagggggtagaagcaccggaggtgggtggttgggagcgggtccctaggcggttccgcgcggtttttagtagccaagactgtatccctttctgcggcaatcatttcctcctagacttctgtcctttggggactttcagagtctcccccgcaagagctgaagaggccatttctg

SEQ ID NO: 439 - DNA, 146 bp, Homo sapiens
tgagcctctatgcaaccccgtgcctgcgtccccacgacccgcagaaaagcacgcggagccgcagcgctaaaaaaagccgttcctttattctgccccaggcaggctgcagtcacagacacacggggaatccactgatggcgtcggtg

SEQ ID NO: 440 - DNA, 399 bp, Homo sapiens
ggtgtggagggtctctgctgagtgtgcgccctactcgggggcgggtctcagttcagaaacagaccctacatctccttctggggaggtgtgtgggggcgaccccagtgccaggagggactacctcggtttcccagtggcccaggtggggtcggtgcatgggcgcctcccccatccgtggttcccgccagccgcggcctcgccaagtcggctgccgaaaccacgcgccagcgcccttccactcccccgcccgtcgtgaccacacgactgagccagcctccaggtctagaagctcctgccacccagtctggtggcaaccagactgggagatcggcccgagctccctgggcttctatgcagccagcaccgagtaggcgcgtgctgtgtgcctggcgagcgagg

SEQ ID NO: 441 - DNA, 221 bp, Homo sapiens
tcccggatattctgtacttaaccagttaggagacaaagggcttcttctgcctggtgcgtgcgagcggaccccagcgagcaagggagctagtgccagagagagctgcggaggctccggcaggagtggggacgtccccgtggttgcgcctcctgcgctcgccccggatccaccgagctagcagcgggcggcgctcagccgcgtccgcagcctcctcttctccc

SEQ ID NO: 442 - DNA, 169 bp, Homo sapiens
tcgcctgcccttgacggcttcagccgtctgagcggagaggaggatccgggaagccggctgcggcgggaggagggaatgcgcgtgcgcgctggaccgcctcgtcccgttccgtcccaatcattgtaaacaggcagaggctgggcggggtgggaatggggcgcccgaggcc

SEQ ID NO: 443 - DNA, 143 bp, Homo sapiens
gcgccctgactgctccgcgcacccacaccgcggccctcagcacccggctgccggtgaggtggtgtcggtgcccccagcgcgctccgcgcccaccgccccgcttcagccggcacccgctcctccgctctaccccagctggccca

SEQ ID NO: 444 - DNA, 162 bp, Homo sapiens
cgtgcgcctgcgtggcagaagcccctgctgagcatgcgcactggtgtgacccgcgtctcctccgtttgtgaagtctggcgggtcgcgtgtatactcagccgttctctcttcacaggcacgtggacacagtgtcacctcctcaagccaagtctaaagcacagg

SEQ ID NO: 445 - DNA, 1247 bp, Homo sapiens
gaggaggttacgtgaatgggagggtttcccgggagggggcagcacagttgtcacagggagaagagtgatttatttttgaaattccagaaaggaagaccaaaagaagctgcctaaaagatcctgaagtgcggggttggggggatgtgagataaataatatgtctacacacatttaacaagtgtcaaggccagctctagaagtagggacagggtgggggcggcggtggtaaatccattcctctggtcttccaagattcaatattaaatgccagcagggagcagatgtgggcaggggctgcagaacaggggtaaggagcgctgaaggaggggttaagcgtttatctcaatggaaattaaccacttggggggaattaaaagagagctggagcgggcggggaaggttagggggagaagcgggacagggagagtgtctctacatgtaaagagaggaactttcctggtgcggagatctggggagggcattcagtaaaatgaggtgagcagggctgcaaagagcaaggcggggcgtgccctccaccgcccccaaccgctccgcccggcccctcccccgctccctcccccacccctcccccttcctgtattagcatgcgggcggcggcgagccggccgggtggggagggcggcggtggcatcgctgcgcggggcgcattgtgggccgcgctcgcctccgcgggggaccatctgctcgctgtcaatgcatcacctgctcgtctgggccgtcgccggggcaacggggggcgggggattaaggagcgtgtgcgtctcggtccgggccgaggcggcgaggtgggggttggggcgggggaggagagctccttggccccccacccccctgccccgagacgggtcgacccgctcgggggccggcgaccaccgcgacgggttccgccgcttgcctccgctccttggcctttgctgccgtgctgcctcttctcacgggcgcggctggagtcccggggagcagcagagagcaaacggtccggctctacctcaccctgccagggggcgagtcccgcgctccctgcgtctacctggagctgcagggtccctatcccggggcgccgcccgcagcctcctccgcgggagctggagcactctgctgggtcctggggacgcggcgcagcgtggttccaagcgctccgcagtcgccgggcaaccacaatggggctgccttgccgtgagaccctcccccgcgactgccaccaaagtcacagaaaactttcacac

SEQ ID NO: 446 - DNA, 190 bp, Homo sapiens
tccttggagagtgagtagaagaggggatggggaggaatccgtttccatcccccgcgaccccctcacctagggcggaggcgcaagctctgctgggtgctctccgcccccttgatcgccgctctcggttttcagcaccaggatccggacagctccccacctggccctgaggggcctctttccttgccctggc

SEQ ID NO: 447 - DNA, 163 bp, Homo sapiens
cggtgtcgggtctctgtgcctgagcgaggaccccaaccctaggcgcctctggcgctgggaaaaggtaaccggaagaggcgctcaagctactcggtctacgcttctgcggccgcctaacccggaagcgaaaccctcgagcagccgcgtcgcgatggcaaccttc

SEQ ID NO: 448 - DNA, 316 bp, Homo sapiens
cccggaaccctcaccaacaaaacccccggtgtacggtgggtggaactcacctcggatgcagctatagccgccatcacaacctttctctcttcccacttccggcaacaagatagagcacttccgtcaaccttcagacaaacgggccgatacgtacgaatgggctaccataagccccgccccttccgggaggtctccggaagttgggacccttttagctatgaaatattttggattgcgtagggtcttgcgcagccgcgaaaagtagcgtgggccaggacagcgggaggtaagtcgccaagaaaagggttgggaagag

SEQ ID NO: 449 - DNA, 140 bp, Homo sapiens
tgcagctcccgacccgcggcggtggagtcccgagattggggtgagcgcgtgcgtgcgtatgtgcacgcgggcgcgcgccgagtggataacgcgcttccctgctagcccccaaacccggcggacactcacagcaccagaag

SEQ ID NO: 450 - DNA, 177 bp, Homo sapiens
gtgcggcgcagctccgactcggcggcgcggaaaaggggaaggggaggaaggggcgggagcctcggcggggcgatccccctccgaccccagccggcccgcggtagccgccttgggaacttctgcgctatgattatccgcccccgcgttggggactttgcctctcttccgcgagactct

SEQ ID NO: 451 - DNA, 143 bp, Homo sapiens
gaggggcggcgggattgacagtcggtaattgggtaactggaggcggcttctccggccgggcggccccgccaccgcgacgccgagcccctgacgtcacccgattcgccaggaaatgaactttttaataatccgaggagggagga

SEQ ID NO: 452 - DNA, 264 bp, Homo sapiens
gccacggccccgccctcttccaacctttcatccgggtctcgggcaggggcgtgtctgggcagaggggcgggtggtggcggaaaggaaggatgtcgtgggagactggagagtggggagggaagcgggaaggggcgggggcggagcagggggcgtggcggagcgggagcgcggtcacgtgacgtgcgtggcgacgtgtcggccatcttgtgttgttgaggctgaggactgactggggttctgagactccctgtcccggaccgcagg

SEQ ID NO: 453 - DNA, 160 bp, Homo sapiens
tgaggaacacaggaagtgctgcaagctgaggctgaggcctagctggggcagagggctggacgaggctcttccacattgggaaggatgtggtcgcagacatgataatggggcaagtgcccattacctcagctccaatgtcatgctagtttcctgggggcca

SEQ ID NO: 454 - DNA, 254 bp, Homo sapiens
agttagggtatgaccagtgcccgaccggtcccgagactggcggcgaggccccgtgacccaagcctgtggtgcaccctgcgcaggtgtgaacgccatgctgaggaaagtggccgtagcggctgcgtccaagccgcacgtggagatccgccaggacggggatcagttctacatcaagacatccaccacggtgcgcaccactgagatcaacttcaaggtcggagaaggctttgaggaggagaccgtggacggacgca

SEQ ID NO: 455 - DNA, 216 bp, Homo sapiens
cacactggttttgttctcttacccaccgtcctggtgtgtactctacattgtgcacaagttgtggcactaaaaatgtaaggtctgttgctcaggtggaaatggactggtcatgtgttttgccgtgcgggcgcagaggtcaggctggctctgtggttagcaggtgcaacccacgcggaaggggaggaggggtttcctgactgagcgagaagccccaag

SEQ ID NO: 456 - DNA, 172 bp, Homo sapiens
ccccgaggtatgcctgaggcttgggtgagcaggcgccgggctcgcagggcgcgctcctaacccgtccccagcggctcgacgctgtggatcccgccgccctccagccccggctccggcgccgactcctgctcaggctcctgctcctgcccccggccccgcccccggccccggc

SEQ ID NO: 457 - DNA, 146 bp, Homo sapiens
aggcggcggtccgcggcagacagactccggtggctcccagacaccgggaacccagggagcatcgcccggctcccctcccgctgcttacacttcttcaaggtgatatagacgctgcccgacgtccggcacttctggaaaagtctggt

SEQ ID NO: 458 - DNA, 240 bp, Homo sapiens
gtcggcggcgccgaagccccgctccccgcctgcgcgtctgtctcgtccgcatctccgcggtgagtcggcggcgccctcgcccctgagcccagggccagcttctctcgccgccgcggctgctgcgcgcgtccccgcccagcccagcccagccccgagcacgaccccagccccacgcacgaccctagccccgcgagtcccgcaccgactcgctcccgccccatttcgcctccgcgggggcgg

SEQ ID NO: 459 - DNA, 141 bp, Homo sapiens
ggcacagctaggaacaagagctgggagcatgacgggaatgtgggtcctggggtggagttgggcctgattctgtgcttgtcctcctattgctgatatagaagcggatgcaccagggggcaggcctccagacatcagtcagga

SEQ ID NO: 460 - DNA, 153 bp, Homo sapiens
tggtggggaaatcgggccacagcccctgacgacacctgccgcggagtctgggggctgagggggcgggggtgcccacggagcctagtatggtgcctggcgtatgaccggcgctcaatatttgttaaatgatttgttacattaatgaaccagaga

SEQ ID NO: 461 - DNA, 239 bp, Homo sapiens
ctgtattcgaccaagggcaggtgcgaccggggggccgctgcgccctcggcaagtctgagagcctcaggcccccgacaggaccatgcttagcacggacttctcaaagtgtggtccctggactggcggcagcagactggagctgggaagtgcaggcgctggctggcgtggggaccacacctgtgatctcagcgccttaggaggccggggaagggggatcccttgagcctgggagtttgaga

SEQ ID NO: 462 - DNA, 177 bp, Homo sapiens
gggccggggtctcacgtccgccccctcgcccccctccagcgtccgttttcgttttgtgcaggtcgaggcggggacttggcgccgtcggccgctcctggatggcggcttggaaaagccacctgcggccaaactccggggcagtggtgcggccgccgggtgtgtgcgcgctcggggctg

SEQ ID NO: 463 - DNA, 159 bp, Homo sapiens
accggaaactttttcctaggcgcgcggagtctggggcggaggcgagcggcgggtgtgcgcgactcggggtgattcacgccggggaccccaaggaggtgagtggtgggtggggggcgtctctgggaggggccggagtcataggctcagcaaccgcgcagg

SEQ ID NO: 464 - DNA, 214 bp, Homo sapiens
atttcagagcagaggactctgactgacaggtgttccccgactcccagtggcgaaaggtcctcagggaaaacaggtgaacgctatcaaagtatgcttatctccgaacctttcttaaaccagagtcttaagggatcgtctctgattaggtctagaattcctctccatagaagataacctacttctcgcgcaaatctgcagtgttcttgcagggctg

SEQ ID NO: 465 - DNA, 140 bp, Homo sapiens
gtgaagtcacgatctatggccatggtcgcttcccctgcagaaggcgggcgctggggtctccgagtgcgcagagagcggcggcggcgagtcgctcccgccggttctgcagcatcacggtcgccctcggcgagggtccggga

SEQ ID NO: 466 - DNA, 145 bp, Homo sapiens
aatggtcccccctacgcggcggcgacggtggccggaaaatggcggcgggaatgggccgggatggtacctcgctgcccgcctgcctggcggggcctgcaggccgagcgccgtgcgtgccgccgggtcctggggcctagcggagccg

SEQ ID NO: 467 - DNA, 580 bp, Homo sapiens
gtgtcgtctcacctcaccgcttgcagacgcgcaggggctgtggaaagaaacctcccccttgggagataggggaggggggcgcatggaagggctgccgctgggttctggcccctcacctggaccttcgtggggatgaggggatgggtggagggacccatagttgagcggaggagccgggaagacttggccaagctcagaaagttggtcagaactgagacagctcctctgcgggactgggatgctggaagcgcgtgttcaactgctccgcgggagcttcagggagggaaagatgctgcgaagctattacagactgttataaacggcggcgggtagagagcagaactccttccttccctactatagtttcttttctctggccactcctctagggcttttctgattatacccagaagagcccaccagcctgtttgccatggctttcttcagcgactgggctttaggaagttgtattccacttccgtgaaaccaccctgacgctcttattgcaatttgtctatgggcagaggagtgaggcacagaaacggttacccacagggccacagagccatgtcagtgttgt

SEQ ID NO: 468 - DNA, 153 bp, Homo sapiens
gcagcctgggagaaagagaaattagtcgtggctcctttaaggggtccgcggaggcgcgcccggccttttgtttgagcggcggcgcgcgcgtcagcgtcaacgccagcgcctgcgcactgagggcggcctggtcgtcgtctgcggcggcggcgg

SEQ ID NO: 469 - DNA, 143 bp, Homo sapiens
agcgggctggcgggagggggcggcgggggccgtgggttttgtttggcggccgggccgttaggattcccagcgccgggcggctctcacgccggccccttgggcaaggtaacaaagcccctttctccagcgagaaaggcgtcggg

SEQ ID NO: 470 - DNA, 142 bp, Homo sapiens
agaaagagacgcgaccacagcggggccggggcacagacgttgtaagccgctggaggggcgggtctctcggccctctccgcgggcgcctcggcttctacgctgctccgaggcgcccgggcggcaggaggcctctagagccggg

SEQ ID NO: 471 - DNA, 249 bp, Homo sapiens
gtctcgctttggcggaaggtagtgcgagatccgagcaggcagctccaccatcagagctgaggaaatgaaaccaactcggtcctgagttccaggaactcggaccgggccaccctcacccctggttcttcccatcaccgtccaggaattcggctgcagcccctcggccccgccgcctcctgggaagaccccatgctcaccttcgcgcctcccgaggggtgtgcgtccaatctgtcccgtgcacagttccaa

SEQ ID NO: 472 - DNA, 351 bp, Homo sapiens
ggcggtgccgcggtgcccctggtcgctccagccgcggcgggggctgggcctgggggtcggcgctgaggcgggaggggccgcccgggatggagacgttgcggccggtggccacagaaacttgagccgcggcagagaaacctctgctccggtctctgcgtcctcttcccacactcccgtgcgctgctttcggcgtgggccgctgcgctcctagggagtgggggcgcagggggggttggccgcggctgcccgaggccagcccccccggagtgagttacgccactatggcggacggggcaccccggccccagctttaccgcagcgtctcgttcaagctgctggagcgctggagcg

SEQ ID NO: 473 - DNA, 157 bp, Homo sapiens
tgcggggttccgggggttagggatctaagtgaggcaacggcgccccctgctggaacaactcggagaggctgggcgggggcggcacggtccccccacccctccaccctgcttcgggctcacgtaatgcctggggactctggaagtagtcgccaggcga

SEQ ID NO: 474 - DNA, 260 bp, Homo sapiens
tgtattctagacttggcgcaggcccctttggggagaagagcccaggggctatagagaacagaggtttgaaggaagcaaaagctggcgagaggttttttttttgtcgcgaagggtgagggtaggcagagaacgcgcgaaagggcagggccttggccgggaagtaccgcccagcgaaaggctggcaagggtgcgcagctggagcgtggcctcgggtacccctttccaggcagccgaactccccgtatcccagctctgcttgg

SEQ ID NO: 475 - DNA, 271 bp, Homo sapiens
gcccagtaagtcccacccactaggccagcccgagcgcgtctgccacgccctgctgcattccgcggcgagagcgcgcgataggattggctctcaaggccccgccccaacaggtcgccgctcagggtgacccggaagcagttgcgccagcagcgtcgcgcggcccagttcccttttccggtcggcgtggtcttgcgagtggagtgtccgctgtgcccgggcctgcaccatgagcgtcccggccttcatcgacatcagtgaagaagatcaggtg

SEQ ID NO: 476 - DNA, 285 bp, Homo sapiens
gagaattttggctttgctcgccttcctctttcagaagactcgaaatcggccagcaggtctgcgagatttgaaacgcgactgttactccttgttttccggttctggccgcgggagcctctcgagaagcgtggaaagaggagaagggcgtataccttgtgaccgcctctggttgtcttgggctcgcgcctggcgccgctacgtggagtcgctctctcgtcgtcacttttggctgccgacttgttgagtagaagtgcagactgatgctttaagactcagggagaggtc

SEQ ID NO: 477 - DNA, 148 bp, Homo sapiens
ttggctatcctgagttgaactagctgttggtcatcctaagggcaggcggtctcctgaagttggaccgaaccattaggacgtgccacagtaacagctacgctgctcagaaggcccgaagggtcttcctcagcgacctagcgtgggcacg

SEQ ID NO: 478 - DNA, 157 bp, Homo sapiens
ggacgcgcgtgctccgcagggacaaagggtcgggaaacttgagctccggccagtcccagagaaacccgggctggtggtcgccatggcaacggagtccgaccctccgaggcctgccgccctggcgcggcagtggcttgagtgacccggcccgctcttg

SEQ ID NO: 479 - DNA, 452 bp, Homo sapiens
cagacgtgcattaagattcctttttcaagtgttctaaagcgcaggcgcaggctgttttgcggttgcctcccggcgcctcttgtgcaggccggggtcgccctctgccgacccagggcgggagcgcgctgagtgaacgtttccaggcctgagggcgggcggagatttttctcgcctgtagagggcgcagatcggcgtgcagagtaacccactctagttgtcccttccttaagcacttcctgtttgatctctatgatccatcctgttgggacttgattcgttcctcaaattttcaatttaccgtaaacaaaggggacgcgcgctgacccggaagtgaaagctggaacccggccggagtagctctgagcgccggctgtgaggaaggaggttctgggcaagctatagccatggctgtggctgtagccatggcgggagccttaatcgggtcggagcca

SEQ ID NO: 480 - DNA, 215 bp, Homo sapiens
tcgagaaagggagtggggcccgcctcttttctgacctaagggcaggagtgaggggccgggaggattacgggcggctccccctagacgcgcccccaggcgagctggagactggggcactccttgcttggtagaggggcggggcgcgcctagcggccacgcgcgcgggcgtcggagggggcgtgtctcgcgggcgcgcgcgggcgtcggagggggcg

SEQ ID NO: 481 - DNA, 147 bp, Homo sapiens
cgccctcctctgggattcgcgcggggctcggcgcgcagcgccccggacggccacggcgcagccccatcccgcggggcgcaaaacacgcgacagcgcggagctcggccgtgcactgctgctccctttcccgcgccgggaccctcaccc

SEQ ID NO: 482 - DNA, 254 bp, Homo sapiens
tccaccgcaacctcgcagggcagcagatgcagtgtggcgggtacggcgtcgcgcaatgtggcggagcgcaagtggacgcggtgcctctcgatggccgcttcgtcgccgctctccatcctccctcctacgcgacgccagggctcgcgagctgacactgaagctggcgcggaaagcgcgcaggacctctcaggaagcctccgcggggcctcacgggaagccgccgcggagcttcacgggaagtgtagtccccttac

SEQ ID NO: 483 - DNA, 145 bp, Homo sapiens
tgctgatgccagaaggcacagaccgtggctctctccagcaacgcctggcaggctgggacaagccacagaggaaacagatgggcctgcgtgtcaaggggaggccaggggacagtcacgggggcaggagaatcaaaggccaagtgag

SEQ ID NO: 484 - DNA, 149 bp, Homo sapiens
cgggcgccgcgcccctctgcgtcccgctgacctgtcagtccacctcacggcgggagccggcgggggctgagccgggactcgtcagcaccgctgcccctctcaggcccgggagcccgcgtacctggcagtcagtctttccgcagcgccga

SEQ ID NO: 485 - DNA, 133 bp, Homo sapiens
gggctgccaggtgtgctggcaaggaggcctcgggctctggctcaggtgtgtttcccgtctcccagctctgccacacctgcgtgaagcggtcccgccaaagccgggaggggtttcctgtggccaaaggtgccag

SEQ ID NO: 486 - DNA, 144 bp, Homo sapiens
ggggacgccgtccccgcccctgcacggtgctcggccccctcgggctccgcgcgcggctacaacccggactgggcgcgcccccggcatcccgcatctctgcgcgcgtcccacatcccgcatccggcatcccagcggccgggcatg

SEQ ID NO: 487 - DNA, 1094 bp, Homo sapiens
tggggcgcgctgcccgaggtggccacggtggcgcaccaagccggggctaaagccggggcagaggggtggggtagggccgggggagggtgacctctgggtttggagaacaaacttgctatccgagggacctccagctctcgggactctcactatccccaccctgcctccagccaatgcgcggataagcgccatgcggtgcgccaacattcgcgccagggctggggtccgcggcgggagagggacgcacggacatagcggaggaatcagccgccgagtccgaggcctgaataagcaaggactcctaggtcaagagtcacggcctgaggacccctcgactcggagggcactccggggtcccagtgccaccaagccgcaggaagagggcaaggggctgggggaggggtccagggcagaactgccgccgtgcagggagcagggagatgaggggctcctttgccaccacccctacgggcgcgccccaaaacggcagacgcgggtggctggcggagcggtcgggggctgactctcactcggcccctgtcagggtgcctgcccctccccgctgcgccccacccggggccttgcaccccggtcggttcccccacgcacctggagcccgccgggcaccccgcctcgccgccagccgcgccaccctggccccgccgcctccgccgcccagccgcccgcgcaggtctcacctttgtgtaaagagtccaggagcaggaggaaagttaccagccacatgccataaagaggccctattctccggggaggtggtcctgtggccggccgtgcggcagcgcctctcccccgctcagcgcgctcccagccgcccgcactcggcgccccgctctctctgctcctcagcccagcgctcggctgcggcggcggctcctccctcctcggctccccggctcctgtcatccgcggggctgggctaggcggccgctctccccgcccccccgcggcaccccgggtggtgagcgccgcgcgagcccggagcccagacggaccccagccccacaagcccaggaacaggagcggcggcccgggccagaccgccccgacccggctccgctgtctgagaggcgagg

SEQ ID NO: 488 - DNA, 205 bp, Homo sapiens
acgtctcgctcctgcacacgctctggagagacgctctaggccggcggaggaccacgtctctatggtgtgccgggggccgcgcgggccgggagttgggtgggctgggggacaggcgcgcccgcgccgcccgctccagctgggctagtgctgcacattccggccagcccctcctcaagaccccattcccaagccccttctcagctcc

SEQ ID NO: 489 - DNA, 150 bp, Homo sapiens
gccctggtgccctcgccggcatgtgctgcctaccagaccaggttttggaaaatgacgatggtgaggtctgttcatggtcgggggtcgttttggaccttgttttgccattttaaaacacgattggagtacagttgcaaataagcagacagc

SEQ ID NO: 490 - DNA, 318 bp, Homo sapiens
caaacaccacacgctcccgactacggcggaatggagagaatgtgcgcatgctcggcgggaatctgcgcatgctcggcgggaatctgcgcatgctcggagagaatctgcgcatgctcggccggaatctgcgcgagctcggcgggaatctgcgcaagctcggcgggaatctgcgcatgctcagagttccggggcacggtttccccgcccctttcaggcctagcaggaaacgaagcggctctttccgctatctgccgcttgtccaccggaagcgagttgcgacacggcaggttcccgcccggaagaagcgaccaaagcgcc

SEQ ID NO: 491 - DNA, 202 bp, Homo sapiens
ccctcccctgcccagccggaggtctggggagttcgggccccgaagcatccttccgggcctcgctggcgccaatcgctccgccgcgggtgctgagcctccgggtgcttcgaataccaaggaatgcaccgggcatgggtgggggacatgctccgggggcggaggcagctttttcggttcccaggctggagaacggccagccaaa

SEQ ID NO: 492 - DNA, 687 bp, Homo sapiens
cccccaggtttctggcgggtccgggggtctctcctccccagctgtgccgaggctgcactcgctcatctggaaaggcttcagccgcgcaagggtttcacctgccgcggccttcccgctccggccgtgcgcatctacccccgcccccaacacacaccccgggatcccgggagctggagacgggctcccctcgcagagcctacggccttcccccgcctggccctgctcggcccggcgccccccggcggtgccaacgcggcccttcgttgttcccaaggctgcggctggaagttcgagcccctgctgggggaggagctggacctgcggcgcgtcacgtggcggctgcccccggagctcatcccgcgcctgtcggccagcagcgggcgctcctccgacgccgaggcgccccacgggcccccggacgacggcggcgcgggcgggaagggcggcagcctgccccgcagtgcgacacccgggccccccggaggtgacaggctcacccgccgccccccgatccgcgcccacccagcctcactcgcgcctgagggcctggggtgggcgtctgcgctgcctcgggggccccagtttcagccaggcccgggccttggcggctgggagcacagctgctcagaggcagggcccagtgccaggggacgcgtgaggcaggcgcttgggcccttatggtgcctg

SEQ ID NO: 493 - DNA, 156 bp, Homo sapiens
acaagtccggcagggccgggaaaggggttaaggcgagcaagtgggtgtggcccgtgcgttgattggcaggggtgggaccgggcttgtcacccgccccggctactccaacccctgggcgggcgggggtaccgcctgggcaagggccggggcgccggg

SEQ ID NO: 494 - DNA, 141 bp, Homo sapiens
ctccgatttaaagctgctgcacagaagacacagcacgggctctggtccagactgcggggtgcggcctcgttcaggagacgccaccgctctggggcctcatcctaaagtgggcccaccagtaaccccagtcgtatagggctg

SEQ ID NO: 495 - DNA, 151 bp, Homo sapiens
gtgggtgtggggagccccctccaccgggcgtcggggccctggaccccacagcaggggcggggaggctgacgggggcgcagcttttcctcctgagtgttcgctgcccgggctggcggcgcggagccggcccgccgccgtctgcccctctgcc

SEQ ID NO: 496 - DNA, 161 bp, Homo sapiens
tgaggcccgagtggcctttgcaaagctgcctccagctgcggagggcagtatgagtgcggtggcgcgggtgggcttgcacgggtccggggagagggaagttcccccgcctcacccgcctcccggttgagcatggctgtctggttgcaacactgctaattgca

SEQ ID NO: 497 - DNA, 150 bp, Homo sapiens
gcccgctcagtgcccggcacctgcgcgccccgagggcggccgcattacctcgagccggctcaggctggagctcttggagcgcgacttcctgcgcaggtacacagagaagaacctgcgcacggcgaacttcttcatgctcaggtccatcgc

SEQ ID NO: 498 - DNA, 145 bp, Homo sapiens
ttcccgagacttctaatagctcggatctgttcctgccattggcgtgagactcatctgaggggcgtgggtgggggtgggcggcgagccgggggagggcgcgtttccgcgcggctgccagcccaggagaaagttggggcccgcggca

SEQ ID NO: 499 - DNA, 192 bp, Homo sapiens
agtttagtttttgagttttttgttcgggttgtggtttctcttcctccattaaaaaaaaaaattggagctgtatttctgtttcctgttcacggagcggacagaaggagggtgtgcagtggaggaggtgtgtggggaggaggctgatacatggagcagagccgagaatatccggaactggagaaaagtgagaaa

SEQ ID NO: 500 - DNA, 180 bp, Homo sapiens
acacctctttgtcctatagctgggaggaacgcattgcaaacgccaacccaatgattccctaaatggggtcttcgcatcagctgcgttaaaatcaccccagcaggcaggttatccggccgccactccagggtcattaaatcagactctccagtgggacctcggaattcgtagcttagcaag

SEQ ID NO: 501 - DNA, 146 bp, Homo sapiens
gagggagcagcactggcccattctgcagatggggacatcgagtcacgggctggctacgaactcctcgggggcgaaggtggcggagagggatgggttccaggacgtcctggcgcccggggaaggctcggcgggacggatttgcggtg

SEQ ID NO: 502 - DNA, 144 bp, Homo sapiens
gaaggtagcggcgagcggagaccccaggagaccgggctgggcccccaccctgaggcggcagcagccccgccccgtcgccacccgccgccctgggcccgcgacatcacctctggggtgccccaggcccttcgcggcctagcccag

SEQ ID NO: 503 - DNA, 406 bp, Homo sapiens
gtccgctcggcagtctcgtccccgccgccgtcggcgtgagcctccacgggcaccacggtgaagttggtgggcatggccgcctgcagccgacagtccccgtcccggcccggcccgcgctgcgccgctcccgccgacgccacgggacttggaggcaggggcggggtccgaccgagccgccccgccccgcccgggccacgtgacttcacctgcttgccccgcggccccacgaaaagttggcccgcggcgacttcctgcagggaccccaacccaggctgcgtctgtctgaccgccgcgacccgggacgcggggctttcgctgcctgcgctcccgaccatcgcagagcccgcgaatccccgctcagtctcctgcaccccctcctgctccagccccctgcccctcctgctgg

SEQ ID NO: 504 - DNA, 127 bp, Homo sapiens
acaactccagcagtaatgctggggcaagatccgaggccgcggagaagttgccagacaagtgccgaggccgccctgcgcgcccaaggcagggccaggcgggagcgggtctcacgcccaggtctgactg

SEQ ID NO: 505 - DNA, 163 bp, Homo sapiens
tgtcacataatttcaatgagactcggatcgaaagctgcacctcactagtatttaggaagatggaaggctgattctgtgcggggaagtgcgcggaaaactcttaagtcccctactcaccaacctgtgccaggaggcgtgacgtaagtccgccgcgggttcgcca

SEQ ID NO: 506 - DNA, 173 bp, Homo sapiens
acttttgtcaagagggagaagaaaaccgacagctgctgcagccccagatcgctgccccgtgtttgctcagaagacctctgggagcccagataaggagaaagctgagagacaggcatctgggcggaagcaatgcctccttcttcccgtcgtcacagaggggaagcagttggatg

SEQ ID NO: 507 - DNA, 189 bp, Homo sapiens
cacacagtggccgtagcccttcctcacacagcgccaggcttccatcttcgccctccgcgtgcgtccagttcccaggccccgggttccacctcaatctctataatcgatgcgacggcctaaagtatctagggaaccccatcactcttaagtaccgactccagtcctggctgcaaggcatgctgggaggtg

SEQ ID NO: 508 - DNA, 151 bp, Homo sapiens
agtttgggagatgcatagtctaaggccagggttctcaatgttggcagtgcaagatcacgtgaggtacgactgaacacggagatctccaaaactgcggagagttttgcgtgtgaacgtatgcacagacatctacatggaaatggctgtaacg

SEQ ID NO: 509 - DNA, 308 bp, Homo sapiens
cgctcctgcttcaccaccacccccgccggcagcaccacgtccccgtcccggtgtcttcgccggctccctcgctcccgttcgctcttcaccgccttcattctgtgattttggctgggcgaaagaaaacagatcagttgagctcctctagctggaggaaatgacgagtttaactcctggacttccgcttccggggtgcccaggctcccagaaatcctcgcggcaaaggttaaacacgtgactactccctagtgggtgtggccgcagcgacaggcttgggtggcgggagtttcaagtttcaaaaacaaact

SEQ ID NO: 510 - DNA, 1534 bp, Homo sapiens
gtcatcatatctgcaccaccaccagtcccgaccggagggcctggctgccaggtagttttcagtctaactgacaggagaagagagagcccctccctcgcagctagtctgcagtccagaccctcaccaaccggagggcaaccaggttaaacagttaaactgaaagcaaaagagggaggaatgaaccggggggcgtgcgggaggtcggggactttcctcctttccctcctggaaagtttcctacccctgatgggcatcctcccacctggatgcaacccggaggcgatctgagaccctggccggacctgggaccgcacctggccagcaccaggcagttgtcatcactggggtctgcgctgagggcctgggagagaagccactcttcaggcgggctcgggcgcctggaggcggggaggaagggcggcgcactcggaccccagccctaggacggccccagggggacgcctcgctcggccctcccggagggaccggacccgccgcgcgcctcccgctcctcaggccccctcacctggctcgccccgccgtcctgtccccgcctggctcgggtcctcgcgcgccgcgtccacccgccgccggccttttttgggtcgttggcgggtattttccgcctggccccacatcacttcccgtaaaggagagcgaggtggggcgggaccttctctcctccacctcccgccttctcctgtcacctcgggagcggcccccgcccggctggcggggggcggggtgctgtcgcgctctccccggcggccgcgcctccgaggggtcctctgtgagccccgaaaaggccccgctcgcctcctttgtcccaacactagtttccgctgccccattctggaaggcgctacaaaatataggagtgttttcgttttgggacacaggagggacatttacaaactgcaccaaggaccggtgcgcggcgaggtgtcgtttggggactctcccctattcacctccccaaaaagccatgttctaagggtgttttccacggcatcagttcgcggtcgccaccgtagcagccggaggtgccgggcgtactcacgccggccccgcccgaggttcccgagtccgcgcggctcctgaggcggcgtcccaggcccggccctgcccccggcttcccgcccctgcggctcctggcttaggtcggcctggacacggcgtttccggggcaagggaatgcccaggattcctggaaataacatgggagaaaaataagtaaaaaatttcgcaggaaaaaaatcaatgtaattccgggaggaaatggcaaacggagtctctgctcacactgtgtaattcaagaatataaaaccactgtaaatttctaagagtgttagagcaatgagtttaaaaagaagaaaactacagtatgttaaggaaccgcctctgtcggaagaaacctgcgcgcctttgctgccacccagcggctctcttctcccagcgccaacggtgtcgctccggcctgcggggtagtgaacctgggactgcgtagggggtcagacctcgtggttcccactca

SEQ ID NO: 511 - DNA, 147 bp, Homo sapiens
gggccagtgtgtggcatcccagggaggtcccaagccctcaccccaccgggagcctcccctactgctgggtcaacctcctggccccatgggggttctcaaagcagcccacgtttctagggcatcctcagagggactcacaggagcagt

SEQ ID NO: 512 - DNA, 141 bp, Homo sapiens
atcctggccctggcggcgggcggtaggcggcgggcggcgtgggggtgccgctggctttttgccggcgggtactgggcggggaggcctctgggatcactctcccggccctgtaggtgccggggaccgccccctcccacccga

SEQ ID NO: 513 - DNA, 152 bp, Homo sapiens
tctctatcctgtttaacctgaaggctccagtaaagttcagtgcccggcgctgggagctctgtgcagggcgctgaatgtgccagtgcgcggctctgcgcgtggacgtggacgcggcatgtaactgaaacaggcacttctgctaatccttgcag

SEQ ID NO: 514 - DNA, 151 bp, Homo sapiens
aaatcagcctggccgccccagctactgtggaaattcctttctccgcggtggttggctgggggcgccagccaatccgctcgcgacgctcccacatgggtcagtgacgtcacataggaaactggccaatggggattaggagaccagcaaccaa

SEQ ID NO: 515 - DNA, 340 bp, Homo sapiens
ctttaccagagcggtactggccttgagggacggatcgcgactctagaaatccagggggctaagctctggggggcaatgcgacctttgccatttgcccctttctgctgcgtcgtcagcacatccacctgctttacttcccgtgcacaaaagaaggaacaggcaaagagatcggtacctctcagaatagcgaaggagctccgcatcaagctgttctcgaatgccggtgcgtttcctgttaaggtagcggggcgacagcgcgatgtgcctttggtgcggcccggccaccaggcatgagtagcgactgttcaccagcgcacaagcagcggcataagtcggcaac

SEQ ID NO: 516 - DNA, 147 bp, Homo sapiens
cgcctctacgcccgcaagagcaacaaggacccccgggaacccacctaagatcgtcatctctctggccatcacagtcccgccgaacaggcttgtgatgactgtaccagacgtgaggcaccgcccccactcctcccggcagtcccgcag

SEQ ID NO: 517 - DNA, 148 bp, Homo sapiens
ggccggagccgttcgcgcacaggcagggcgggtgctgagcgtggaaacggggctggaattggccgagccatgcctttccgggatgcccaccgccagtcaaagggttgggggtggtctctgcaccttaagtactaacctgccgcccacg

SEQ ID NO: 518 - DNA, 176 bp, Homo sapiens
tgggctcgagcctgtgcggcaggatggagccaagggagagcgtggtgcgggggcgtggggaaatcgggttgccccagccgttactggtccgcgcagtcagggcatcctccgcatcctccacatccttccatggctctgaagaataaattcagttgtttatggatcttgggtctgtg

SEQ ID NO: 519 - DNA, 421 bp, Homo sapiens
ttccgggttccgccctcctgggtccgcccacaacagcaggaatgcccaatccgaatacgggaccccgccacgggcggtcagtcaactacatcacggccgtagattggctgatatcgagtctgtaggcgtgtcgcgaggctccagacccgcctctgggagccccgctgtggagcatgcgcggagggagggctgcgggggcggcggtgcgggctcttggggacctgaggacgctgtgagagcgctggcggcgactgctctacgcggtggcggaactctgggggcgaacgctagggagggcgttgtggagaagaggggaacggagggccccagaggagaggcgcccacccccaaccccacgggtgcacctgcggatccccagtccccgcttcgcccccaggcacccgccggacacagggaatgg

SEQ ID NO: 520 - DNA, 151 bp, Homo sapiens
aggctaaacccaaatccttatttgccgcctactcacgcctttgtgaggactacgattcccagacggcaacgctcccttcactcaacttccttagctggcggggagacgcagtttacagaactacctccccaaccgaatttcacacacctgt

SEQ ID NO: 521 - DNA, 140 bp, Homo sapiens
caacgctgattttgcgtattcctttaatgccgaccttcgcaggattctgttcgcatagcccggtggagttctccagccccgcgtaggccctcctgaaatttacccagagtgggcgcggccatcccggcctcgggacaggg

SEQ ID NO: 522 - DNA, 239 bp, Homo sapiens
ccctgcctgaacaggcatttgggctccgctttggaagtcctggctgctgtggatatagccctcatgatcatgctttttgatcattttcagagcactcactcttccattgcctttgcatctggccaggggatggagcagccccatttgctcacttttttcaggtgaggaaattgaaggccagagtgagcaagtgactggcttgcggccacacagccagttaatgcagacatctggcctga

SEQ ID NO: 523 - DNA, 143 bp, Homo sapiens
aggtctgacccttgaccctaacctctgacccccgcaatcgctccaggtctcccggagcccgtgctgcgcaaagtcgagctcccggtacccactcatcgacgcccagtgcaggcctgggtcgagtccttgcggggcttcgagca

SEQ ID NO: 524 - DNA, 145 bp, Homo sapiens
agggctcagagctgctctcctctcacgcattccccggatccgcgcggagcaggctgctggccagccccgggcccgcgccaagcagagcctcaggtgcggttcccccacaagcaagtggcgcgggcggcggcttagaacggcccgc

SEQ ID NO: 525 - DNA, 149 bp, Homo sapiens
cagttacctgcgccgcggtccgcagggtccccggcgtccgccgaaaggtcgccgcggcaaagccggcttctctggccgcgggatacccacccggccgcactgctctcgccacgatccctcccggccgcagcgccgacgccggctccaga

SEQ ID NO: 526 - DNA, 149 bp, Homo sapiens
ggagtttgcgggaaggggaagctgctgcgaagcgtgtgggaaactacccgctggcgcgcgcccaggcgtccccgagacccccagttccaggcttggtgccagccaggcccccagcaagccccttaacttcccttagacttaattcaccc

SEQ ID NO: 527 - DNA, 149 bp, Homo sapiens
gcagacagtaaaatacagataagacagctcaggcactgagctggggcgggcagcggcaggggcgggcggcgggggatgtctcttgggtaactgccaaacttcaccgtcatacaatgggccccatgaaacagtgggtcttaataagcaca

SEQ ID NO: 528 - DNA, 136 bp, Homo sapiens
cactgtcgcgaagctcccgcccaagccgaccacgtgccgcgagcccggcggggagagcccactcccgcgccccttccgggcccactaccccgccgggctgtggcccatcgccccagtgcctggtagcctagttttc

SEQ ID NO: 529 - DNA, 392 bp, Homo sapiens
ggagggagggagggagagagcgagcgagcaagcaagcaagcaagccagcaggatttggaatcgtcccctaattggaaccacaatcgcaggtttcagggactcaggaaagggtgcagcccagcttgtggttgagaaatgaatgtcagatgttaggaagaaaaaggcctatctcaacatagcaggggtttcttactgcccctgcctcctcagccccggtagcctgtcactccctggcgaacagcttggcagcacagaggcaaaccacagagtacatttgaggcccagatctgcttatttcgagggtggggccgcgtttttctcctgccacagtgagctaattaaagaaaacaagcttcgggagttgggagagaactgtccacaggacacttggg

SEQ ID NO: 530 - DNA, 136 bp, Homo sapiens
gtgctgggagaggctatggcaatctagatatggccttatcaatgaatgttaattaccaacggtaatgaacgattgactgcctcggctggggcgggtcggggactgctgtgtaagatgggcaggatcctgcgcgaca

SEQ ID NO: 531 - DNA, 142 bp, Homo sapiens
ttgttgctccagccgcggccgctcgcccgtgttgtgtgtccccggtgtcaccgagcgtgttgtgtgtccgtgcggcgcggcgctgtgtggctccctcgcgcccaccacgctggcccccgggccccggctcgcccttcccagg

SEQ ID NO: 532 - DNA, 1787 bp, Homo sapiens
ccatgtgcaaaaaagtaagcacagtcacgtaggtataaacaggaagccaaggagcccagaagaggggcatatactggcggggtgggatagctgcccggtcttaaaaggcaaaagaaggcgggagggcaagccaggcaggaaggccagcgtcaaggagagaagcggcttggtttacaggagataaaaacagttcgaagttgctggaacatcaagcgcaaggcagggagcggtgggagttcaggctggagcggtggggcctagcaaggtggccacaggcacaagcccgcgtaattcccagaggttgggtaccggagggccgcttacgcaattcgcaagtgaacgaatttgggcgcccatggcgaggctctgtcagtgacggtcggtggtggcgccgccagccagccccccgcccccgtgcacctgtgcgccttcgcagctgccaaagcaaacgcaggctccccgacttcgccagattttcaaagcgggctgccagccccgggccactgccacggccgccccgggcccccacccccggacccctcgtttatgcgctcggattacagcgcctgttgacgcactgtagcggccgcctgcgcgccagcggggcccggcggttttctctgcagtcgccaccgggttttcccgaagaagagtccctcccgacctggggctggggaggctgggggcggtgaaggctgcttcggcccggctggccccaggcggggcacggcggcggggaaggggccggggccgctggggcttgcgcgaggcgcagtacgggaatccgtcccccccgggacagcgcggcgggaaacaaacaggacgagctccctcctctccgtgcccgcgccctcaggcgccaggggtggcaacggcctcaggggtcgagggaggcggctcgggctccccgcgctgccaggctcaggcttgggctggggctggggccggggccgcggcaggcacccgcggcgggggcgcaagcggcgcccgggagcggcttggggcaggggtgcgctcggccggggcgtttggtggccccgggcccgtgcaccggcgcccagaccgctgtcattacctggccagtgtagttttcccggagcccgggaggcctcgcaggaggtagaggtgtttcctaaagctgtggcggcgaggaggtgtcccccgcgggggcggccggggcggccgctgccgctgctgctgctgctggggctggaggctcagcctcccaaaagattgaaggaaactgtcctccatgggcaggagggctggctgcgagagccccgggttccctttactgaagtcacggtcttggccaaagctgttgtttttgtgactctccggccatgtgatggatagaggggcgggcgctgggagcccagcccctcctttccacccgccggaaccgtgctgcgtgggagggggcgtccctacctggaaagctggggacgctgggagactcacagcccggaaaacaagggtgacgcacccactcccacctcgacccccgctccgcctcctggtgccctttgccctgagcagtggaggggaggggccccgtctagtaggtctctgggacacttccccggcctggaagccaggcctcctgccacagccctccccaaccccagccccgacctgcctagaccctgaaagtgaaatcattttagctgatgattaatgagctgcccggcattgtaaatggcaacagtaaaggccattgtctcccccgatttgtgagcaccaacatctggctggcgtcccaagggctaccaccactctcccagggc

SEQ ID NO: 533 - DNA, 137 bp, Homo sapiens
gcaggcgcagctgggtctctgctcctggctcctctggccgggtggcccggcgccgggctgcggctgctgggggcgccgagccccccagaggagcagctgctgcccgtccgcctgtccccggtgggagcctattcgcc

SEQ ID NO: 534 - DNA, 197 bp, Homo sapiens
tggagttcaccgggaccaggtggcggcgggtgcctttttgggggtgcgcggccatgcaattggtggatttttttaaaccgttttggaggggggagcgcggcgttgggggcgggagagcgctcctggctgtgagctgctcctgccgcttcgctccgcgctctcctgccgctccgctccgggtctcccgcgctcctctc

SEQ ID NO: 535 - DNA, 162 bp, Homo sapiens
tgtatacgtttgcagttctctgcccagccgctgtggaaaatcggcctcgaagtgattgaaattccctgtttatatcaggcggcttctttcagatccatcgtctttctcccggagtatgaatggaaggattcagtatgcgcttcacatttgtatgtctctggc

SEQ ID NO: 536 - DNA, 178 bp, Homo sapiens
ggacgagaccggccaccgagacgctgcggggctagagcggagcccgggctgcgaagcccggccccggactgcgcgcatgcgcccgtctttcatacctgcactccggacgcgcccttcgggtctgcactgacaatgacttgcttgcatcctttgtggacaccttatttccccgactcca

SEQ ID NO: 537 - DNA, 137 bp, Homo sapiens
gtccggacgctccagccggccccgaaggtccggcggccccggcagcacctgaacccgggacccgcccctccaagctggcggccccggcctggggacccgcacacagcccctcccccgcaacgtcctacagaacggtg

SEQ ID NO: 538 - DNA, 146 bp, Homo sapiens
ggctttaaccacctgctggggaagccaagctgagcagaaaaaacggcaacaggaagaagcacaggaagcacctgtgtggatgcaagtggctcattccagacgctggggcgagggtgggcaggggcaggcaggcagccctctgcaca

SEQ ID NO: 539 - DNA, 268 bp, Homo sapiens
atttgacccctccagccccctaacctgccctgggggacatgcgttcccgggcctcgtcttcctctagcgcggatcgctacacccgtccgagccctcctcgagggcctcaccaccgggcggggggagatggaacccgggagagaagtgcagaccgccagtcccaagaaaacactacacttcagctgctgcagccccagcaaacgccgaactcccgggaaagcaaccggtctgacctcacttcctgtcgccgagcggaagtgacgaaaaa

SEQ ID NO: 540 - DNA, 511 bp, Homo sapiens
ccctctctcaccccagagttcaagcaccaaccgaaaagattgagagtagctcagggtacggtaaacggaggaagctttgaaaaaggcggggaaagcctgggatggcgagggggtgctcgctgaggaggaggagagaagcgacagtcgcggggcccggaaaagagagacttagagcgaagccaaaggcgcctttcttcacagtttgggaacttactggtagtaaacgccactccatagaagcggtgaccggttaccatagagaccgcgtcggggtgggcggagcgtcgcttctgagctgtgccacggccacatcagctcggccagaaacgcgaacacgtcggaacagtgacttccggcggaagaagaagccggtccggagttctggccgacagcaggcgaggagtgggtagcagcgcctatgtgaagttaggtaggtctgatgtcgtataaagcgcggagagggtgcccgccaatggctgggtgggtaaagccgactgtgaatggagaagat

SEQ ID NO: 541 - DNA, 314 bp, Homo sapiens
agtccatgggaaaagaatgcgcccctcgcgcttgactgacgaggcttgcgggccaatcggaatgtagtcaaaggagccgctaggcgatccaataggtagtagggggcgggagagaggggccaatgagcctggagctgggggcgggggcagggccgcgattggctgagaggcggccagagggcgggcgggggggaactcaaggcctgcttgatacgtccgccattttgggcgcttcgctgatggtgtcggtgagcgcgtttcccgcctgagcgcaactagcggcgggtcgtgggcacctccaggtaatgggggta

SEQ ID NO: 542 - DNA, 146 bp, Homo sapiens
atctctcccttatctcatgccgcggtgaaactttgctcaagttggtggtgctctgaggtctccagggctggaggccgcgcgacgcgaatcgccgacactggattctcgggcgttagtccgaagtttaagttcccttcgttcactcc

SEQ ID NO: 543 - DNA, 153 bp, Homo sapiens
gaccctagccgacgcccgcaataggcggaagtggccgggctgtggctcgcagttattggctgtcggcgggggtggggacgttcgattcattcacccgagtagcacgtgtctcccgaagctgcaagcacaacagttcgcactggggctcaggca

SEQ ID NO: 544 - DNA, 134 bp, Homo sapiens
cagggccaccatagaccagaggaaaggtaaaacacgggaaatgaaaccaagtaacgtggtgagagcacaactgatgacaatcacagagagcacagtcgactgcagggggtgctgaatgtggccttcagaggaag

SEQ ID NO: 545 - DNA, 159 bp, Homo sapiens
ggtgtcggcgaccctgcagcccgggacaccgcgaagcagaggcagtgtttcagggagaggagctgggccgcggcggcccgggcgggcaggagatcctgaacccccttagcctcgtacaggtcccgcaaactcggcagcctcacctcgcggggttaggcg

SEQ ID NO: 546 - DNA, 169 bp, Homo sapiens
acctctctccgctgcgtccaggtccccggtcttgacaacggcgcggggacccagcggatgcccccgcggggcagaacagcggctactcctcccggcccccgggccagagccgccagccgaggccccgccccggccaggcccgcccccattaaccccacctttgccgctg

SEQ ID NO: 547 - DNA, 173 bp, Homo sapiens
gcagttcctcacttgtaaggtgcaaagtgcgcagccacaggcggctggtgcagacttggagtgtgggggagcagcgctttagctcgagagcatttctcagcagtccccgtggtgtctgggaagccagggctctgttttgaggagtgtcgtcagagcatcaacaccaaagtgct

SEQ ID NO: 548 - DNA, 283 bp, Homo sapiens
agccgcggccaggcaatcactcacacgccgttttccaccttgaccgagcgcaccctgggcaggcctccgcgctcgcagacgttcgcacagtcgcttagcagccgacagcgacggccctggaagtcctcctcgtcccagagcgtgaggctggcgggcgccgggcccggcgcgggggcgctgctcatgccgctgcggacaggaagggtggcaccacgcgctcagcgtctcaagagccccgtttcgagccacacacagcctgcccaacctgggtagcggatgaaga

SEQ ID NO: 549 - DNA, 136 bp, Homo sapiens
gtccggaactaggtactgatcgccgcaccggagcccgaggacgctcaccgtgccgcctccccgcgggagccccgggagcggcccatcacctctgcagcctcgccaggagaagaaaagttcccacgtctctaccagg

SEQ ID NO: 550 - DNA, 143 bp, Homo sapiens
cggccccaaaccccgcacgccgggcgccggccactccagcccaactttcccaccgccgccgtcgccgccgcggctcccgaaaatgtgttgttaatgggacttggccgggtttgtgattggaaggggggtacggaagggggggg

SEQ ID NO: 551 - DNA, 144 bp, Homo sapiens
tcctgggctccgtccccagacccacgtctgccaccccagtcccaggtgcgaaacaggggcgctacctctttaaaagcgtccggggctgagtctctgccgtaccatgtgattgcttgaaaggccgggctgggagcgctgcggcgg

SEQ ID NO: 552 - DNA, 263 bp, Homo sapiens
gactacaggtggccgctgcaggcacaacgcgcccaacaagcgccatggggatccgttgcttgagggtgcggctgcaagagccaggctgcgagagcttagactgccggcccagagcctctcgaaccgccgccaaccccccgccacccctaacagcgtccgccttacgggcgccgccatctttcgttctcccacaatgcaccgcggctcccagggatccctcagccgcgggagcggcaaactaggggaaagctcagtcccggaac

SEQ ID NO: 553 - DNA, 1746 bp, Homo sapiens
accgcaggggtcaccaaccatctccgccacgcgctactcgggggaaggaaatcgcgctttaaaatacaaaaatctgtagttttaatatgatttcctttattacccagattgtaactgaagaattgcaacgcagcgcttctgtctgggaaaggcagctgcggcagcaacagctggagtagtgcaagcgggaatctgaggctcagtaaaagtttgtaagagttgagatctagctatcagaaagcggcagcggcatccttagagaccctggggacaaaataaatgggtctcccaccagttgaatgacaagtatcatcagatcggaaacgaggctcagtttctggatgctgagtggactgtgcgtgcgggaatattttaagacggcatcgtatgtcttgcttggcaattaaaatagttgaaaaagttgctcaagaaaattcgaagggttttgtgttctgctttcacttcagaagttatcgggcagtgagttgcggcgcgaagccttaagctttcacttcacaacttaggcatggttgaaaagggctacccacccccacccaccatcccactcccgccaactcccccccccacacacacactctctctctctcccaacctttagtccaaatcgaagcccgcaaacctcaagtatatgtacatttatttcccttcagatgaaaataaagacatcggcctcatttaaaagcaaacagggaaaacagttccaccggcgccctttgacactgtagcagcgagtgtaaagaacaacacccaaaagagaaacagatggactgatgacccaaagagccctatatttaggttgatttctcagacccaggggaaaggaaatgtatcggggagtgtacgagtgcttgggtgaggactgcacaaagcactggaaaggcgcctgggatgacagcatctcgcggggctacaccgccgactccaatgcccgcgaagccgagcctgctgaggtgccgccgacttcccgggctgctgcagggacgcagtgagcaaggaggcgtggatacgatacctaccgtatttggttctaatgtgcgagggtcgcgcggggggagactgggatttcactggggagaagcatcccacccatctccgatctctcatttctgcgttccgtaaacaacacaattagagagttttgttttcggcgagtgcgagtgtgggagagagaaccgcggcctgtccactcccgaggcagctccagccccgcctattgacacctcaaggaagagcgctcccagccgctccggggctcagtgtccctgagtccccttcaactcgaagtagaagcatttggacaaacgcagtcctgtcgtctacagtcctggcggagcatcacaccgtgtgggaaagtgtgggccccgccggcaaagccaggcgagtcatccaacacttttgctgtaagagtgggggatgggactcccaccgccccctccccaaaccccttagcccacatcccgccagaccaaggccgctccgcgccgggcaggcagggggcgccggggagggttattgaccctggacccaggctgcacccagacgaagcgccggaggctgcgctgcgccctctccgcggcccaacgctctggcagcccgccccctggggtttgctcggcgcccagcaagcccgaggtgcgcgggtcgcagcgcgccctctctgcctcctgctcctaggctgccgccgctggctgtgtgccctccactcccggctctccgagcgctcgc

SEQ ID NO: 554 - DNA, 157 bp, Homo sapiens
atcggtttctcacacgcacttcattggcagcactggcgagtcagttttccggtggcggcggcgctagttggtctgcacgaaacgtttcccttctcgctccgtgtgtcccattctccatcccacgtcctccagtgccggggtcatggtcgcagcaccc

SEQ ID NO: 555 - DNA, 462 bp, Homo sapiens
gcggcggggaagatcaggaaagaactgtgagtacctaagaaaaagaagaatacacgttagctctctttactgaggtcggaaccttccgagacccgccacatttcagcccgacaaacccgagatcacgttcacttcctggttcacttcttccgggttaacgcacgctcccggcccctcctccgccactaccgctctccggaggagttgtcctcgagcatgcctaacaatggactaaaatgacaaaaatgagctaaatgagaaaaatgacaaaacgagaatgaaattgtcatcagacaaccgcccccgcgccgtccttatccagagcgtgagcccagagcggggatggagatggtgggagggagggagggagggaggggccaaggtgggactaaactacaactcccagagcgcccaccaaagaatcctgggagttgtagtttaccttgcggcagcctccaaccc

SEQ ID NO: 556 - DNA, 139 bp, Homo sapiens
tccccgtccgcatggatctgccgcccggctcggcggccgcgcggggggaagctcgcaagtgaaactattattatcgccctgcgaagcatggagctgttggaagatgccgcgtagagacggaaggagccgccgccgccgc

SEQ ID NO: 557 - DNA, 445 bp, Homo sapiens
ggagtcgcagctcccccttggggctcccgggcgaggccggccaggcgggatacctcaggagcccatggcggtggcggcgtctgcggacgatgcgcggcagccggactctgcgggcggggcgggcggcgccgcagccccggagtctccgccgccgccggcgcgtcccgggcccagtggagtgcagccgcggcgcgcatgcgctctgggctcgccgccggggagggcggggcggcggacgcggctgagatcactgcctgggccttaaaggggccgcgccccgaaccccagcccgccgccccgaaccccagcccgccgccccgcgggttggggcgcgacccgggttctcttgccactcacaaaaccagctacgaccggcccccaaccgcgagagctttctgggctgcgatctctgcccctgaccctcgctggtgcttcacttctttta

SEQ ID NO: 558 - DNA, 134 bp, Homo sapiens
gaggtcagaggccgaggccgcactcagtgcctgggtctcgcgcagctccagggctctcaggcgacactgggcgtttcctttccggcttcggaaagttttgttttggttcaaggaaaggcgccctgttgaccaaa

SEQ ID NO: 559 - DNA, 148 bp, Homo sapiens
cctgggccaatggcaggcggggcgacgcgaccggattggtgcaggcgctctgctgatcgctgtggaaactcgggcggcggggaacgcgggaggatgtggaacccgaggcggggggagccggaggggcgggcagaggaggtgtcgaggc

SEQ ID NO: 560 - DNA, 152 bp, Homo sapiens
atgccgaggtgctcttgcggaagccaaacttgggctctccgaaacaggccgggaaagctgaaagcacagtgacctccttcgctctcccaagccgctgggtcgccgctacgcgccgaggcgattagtcagtgaggtccgcactcggcgcagac

SEQ ID NO: 561 - DNA, 349 bp, Homo sapiens
aaggctccgaggagggttggtggggactcgaacctcggagtctctcccgacccgggggtcccagcaaaccagaacggccacctagacagcctgcggacgggagaggaccggctccctggcgcagatcatggggcaggtggagagaggcgagaggcaatgaggcggggggctcggggtgcacggcacgctccgcacactcccccttcagcgctcactcagacttggtttccccgaagacacactctcgtccccgccgctgattgcccactccttccgcctgcactcctgcctccttctcaccctttcgtcgagcgcacagggcggctgccaagtcggcaccggtgcgcac

SEQ ID NO: 562 - DNA, 260 bp, Homo sapiens
cgtggggcgcgcgcgatcagcaggcttcttggcgcccagtccatgcgactatctcttcccagccccgggactaggcccgccccactcggattctccactcttggtagcgcgcgtcccccggactgctgagaccaggcggcgcggaggcaggtgacccgcgtctccagtcccgggcgcagcccagggtacgttgtcagcatcgcggagcgcggccctgggcctctgcagccatcttcagggagggaggcgcggcctcccga

SEQ ID NO: 563 - DNA, 142 bp, Homo sapiens
tgtgtgtgtgtgtcccaagtctctttcacgcctgtgtttggattcgctcacgacatcttcataaggtgcacacataaaatgtagcatttctctgccctctgaaaatgcttcttctaagtggcaggtcgagagttgtagtggt

SEQ ID NO: 564 - DNA, 470 bp, Homo sapiens
ggtcgtaacccctgggtcctagcagggaaaaaggcaagcacttccggctccggctcttttaaataaaataaagacacgtcaaaaaataatgccgcaaaaattctgagtatacatgttttaatagacaataataactaggaataggactgagaaatgtattctacctatccttgggactacgtagaaatttggaattctttctgagctaataagacctggtggagggaggaatttacttccgccagaagtcgaagccaatccgcttttgggctatttccgcccgcgtttcttctactccgaagtgcgcctcttagtggtcagaagagaacaagacagagacttcctaataatttcatcaccgaatttagacagtaaatagtaacgaaaacagctaacatgcgatggagttcactatgcctaccacaattctataacgtacccctattattgtctccattttgcatatgtgg

SEQ ID NO: 565 - DNA, 148 bp, Homo sapiens
acccgctgcctggcttccccggccccggcccaggctcccgcctccgggccaagtctctcgctccgcgggcttcactgctcgcccccgcccgggcgaggtggcaaaacaaacactccgccttccagaccgggcaggtacccgggcgggc

SEQ ID NO: 566 - DNA, 247 bp, Homo sapiens
agcacctccccctttccaaaaatgctccggaagtgccttcgccctccgtaaagatggccggggcagtcggcacgagggaggcggggatgcgcctgcgcaacaagttcggcggggaagatggcggatgacaaggtgagtggccgtgggggtgatctgcagccgggcgtggtcttcactctccttgacctttttagttccggggagaagcgactctggagcggctcaggagtgaggatgtcccttgttt

SEQ ID NO: 567 - DNA, 142 bp, Homo sapiens
gggggctggacctctggagtaagccgctcctttacagtggggagacggcgggaacccgtgccccaagatgccgtgcacgtggtcggctccgcgcggaggctccttccggcgtcccgggggggcgctcggctgatgaaacgcg

SEQ ID NO: 568 - DNA, 235 bp, Homo sapiens
tttctctcgggccctggccgccaaagggccgtcgcaggcgtctggggacatcagctccatgcggctctgggccagggcatgctcgggcagggggacggggtctgcgaatagtgactctgtgtccgcgtgcgtccccgagagccggaggcccaggccggcccctctgcggtttgggaaccactcaggcgcctctgtggagcgggcgggaaaagacgccgcggcctccttggcattc

SEQ ID NO: 569 - DNA, 136 bp, Homo sapiens
ctctacttgaaaatcccccagctaaggagtatctgcccaaggtcgcggccacccagatgttcggtccccactccttcctccgctgaaaagtcgcaccgatgactaacgttgcctgccggcctggtggtttgaaaac

SEQ ID NO: 570 - DNA, 156 bp, Homo sapiens
accggtgtgcaaccgaaggtgaagagcgggaaggcgaggaccgaatcgcctctggtgtgcgttgtccgacaggaagtcccgaatgggctgtgagccgccggtggaggtgcccgggcaggtgcagagccacagcctgcgccccgtgagccgaggcgg

SEQ ID NO: 571 - DNA, 134 bp, Homo sapiens
ctggggctgggagggagctaataaacattgaatgtgcagcagctgccttggcggccggagtccgcccgagcgacaccggagcagtgcgcccgggaggcggcgaggggaggcggttcgccttgtccctcccaccc

SEQ ID NO: 572 - DNA, 150 bp, Homo sapiens
cggcgggcccagtgttggaggtgaggaggcggggctggcagggctagtcggggcatctggaaatttccgaccccacgcttcgggcgtttccttatcaggttcaccgctccctgatctcgcgctgcacttcgtaggcgcagccgctgcttg

SEQ ID NO: 573 - DNA, 208 bp, Homo sapiens
atacctgttattttcagctgagtcccgcacagatcggcagcaccggttttgaaggccacgtgtactccaggtaaggaggatgcaggtgcaggggccaactgcctgtgcttgttcccttacacacttgttgttttaacttctttgtgcttcgattttcccatctgtgtaatggggataataaaatgtacctccaggccgggcgtggtgg

SEQ ID NO: 574 - DNA, 145 bp, Homo sapiens
ccgaagggtacaccaggcctgatgtcctaatgcagaaaccgggccttcctgcagtgggccgggtcagctcggatctccgcgcggtcctgagtcgccgcccccaacccagccaaggattaatttaggcgagctatcccgcccgcca

SEQ ID NO: 575 - DNA, 138 bp, Homo sapiens
gtgaagggtagaagggttcgcctccatggagaccgcacagaacagcgttccggccgggtctggatctgagctcaggaacgcggggcagggctggggacagctcggtgacgcgacccagggtcaggataacatgcaggg

SEQ ID NO: 576 - DNA, 132 bp, Homo sapiens
agctaccacgcccggcctggctgtgctctcttaaagggccgaagcaatgcgggtgctggcgaccgacgcaaggaggtgacgcacaggggacttaaggagcggaccgccgcgggaggacgcgcccagctcagg

SEQ ID NO: 577 - DNA, 135 bp, Homo sapiens
aaaggtcctggctccatgtctcaatgtttggagccactctcacaacctagattgctctctccgttacaccttgcgcgtctctgacgactgagccgagatacttcttttgtctcctcccagccttgctcatcaacc

SEQ ID NO: 578 - DNA, 260 bp, Homo sapiens
tcacagcgcgataagagagaacgttcggaaaagccctttatagattaagagactgaggctggctgggaggacgccacggcgccgctcccaagaccaccgcggcggggcctgagctccggtgtcacgcaaagcttcccttccgcggcggggcccgggccgtctcccgcacaccggccggggcaggggagccccatcgatgcgctccgccgctcggctccctacgcctgagccctgcccgctcgagccccttccccctcccg

SEQ ID NO: 579 - DNA, 151 bp, Homo sapiens
ggcctctccgctcgccccgccgcccacctgccaggggaaggagcgcagtgcacgcgccgccaggaagcggcgctccaaactctgcagcaagagttcggtccccgcgttctcctcgggcgccatgacgtgggcggggccgcagcgttgcccg

SEQ ID NO: 580 - DNA, 171 bp, Homo sapiens
cgccggcagggccagaaactcccatctccctcaccagccggaaagtacgagtcggctcagcctggaggtgagtcggggcggggagggccgggcaggctttgttcctgtgtaaacggagcgcacgtacctggagcgcggcgggcgcccgattagcgccctgaatggaggtga

SEQ ID NO: 581 - DNA, 578 bp, Homo sapiens
caatcattacctagccactgggtctcgtcgcctaggagaggaagcggagggtgctgcagacaccgaggtgaacgtaaagccggcgagatctccgtgctccgggtacccacagatactgtccgcgccgcccgcgccgacttcctgcctagctaaggcgagccccacccacttcccgcctccggggcacgccccctcagctccgcctcgccattcgtcgggagagccgtcactcattccctcacctcccggaaaggggtgggactgcgacggctgcagtagcgtggaaaggggggtgacgtcccgcggacttgaggcgggcagatctggggggccccgactccccagcggccctgtagtggtgcgggcgaaactctggccccagataggaccggtgagccgaactggggtgtgcggagccggggctccgggggatggcccggggcggcgtggcgggcatgagagctcggggctccgtcacgtactccgagtcccgcacgcactcagcgtcgctctggggccccacgtccggccctcgaccttgctgacaactttggcggcccgggcctgccgcggccctc

SEQ ID NO: 582 - DNA, 150 bp, Homo sapiens
gaggctgcgtctgtatccgggcccaaggtcaccgcgcgaccggcagatgcgtgctgcaggccccggccacatgagcagcgctacggacgcgactgccccggccttggatatgccagatcgagtgtccacccgtccgtgggactggtcgcc

SEQ ID NO: 583 - DNA, 144 bp, Homo sapiens
agcggtaagccccggcctgcgcgggttcccatccctgttctcaccagtacgagggctgcggccgccagcgccgcgccgagcaccgccagctgcaacagaagcggagccattctccatgccgtggcagcccgcccaatcccgcac

SEQ ID NO: 584 - DNA, 171 bp, Homo sapiens
ggccgcccattgctgtatggcatccagatcttcttcagggggttctgtgtcaattcccgtggggacgccatcccggggccgggatgagtcggactgcgccgcttccaacccagcagccgggccacctcgggccacccgaggtcccgccccttgggccccgcccctcctcaa

SEQ ID NO: 585 - DNA, 475 bp, Homo sapiens
tcgtaaaggttctggagcagagcgtcaagaagtgtcggagaactgggaggcgtggaggaccccggcccttgctcctgcgacattgtggggtcagccgaggaatcaaccctcattctgccgcgctgcacccccgcttccgggttccgcgactgcgcgcatgcgctgcagggccctgcgcggcttccgtcctggctgagatggcggcgcccgggatcctgtgtagcggctgcagagggtgccgccgccctaggcgaagtagggccgtcctgagcgaaagaaccgcccccagcaggagcaccaccacggcttagcaaagaatcccagaccccgcccgggaaggcagccgcaccatggagtcttccagttcatctaactcttatttctccgttggcccaaccagtcccagcgctgtcgtgctcctctactcggtaggcgcccagggaaaagaggcccagagcggagccgcgcgaaatag

SEQ ID NO: 586 - DNA, 137 bp, Homo sapiens
caggctgagggaacgggcactcggagcttctgaggcggcggcggcgggagccggtcagagggggcggcccctggcggcgacgcccccaagcccagccctgcccggccccgctccatccccagccagagcctggtctg

SEQ ID NO: 587 - DNA, 172 bp, Homo sapiens
gccctccgatcttgaagagcccgcgctgcgcggagcccgcccccgcctgcgcaccggcaccgacgcggagcgacccagcccagccagacccggcccggcgcggcctgatctaacccagccaggcaggtgggtgtccgccctgcgtcccgcgccgtctgcgtacccggaacca

SEQ ID NO: 588 - DNA, 148 bp, Homo sapiens
ttggccctgtccgctctccctgacagtccatctacatgccaagcggcccgacgcagctccgccccgcccactcctcggcgcaccgccccgcgaccgagctccgccctcatctgcgcggcccctcaccttcccgccgggcctcctcgag

SEQ ID NO: 589 - DNA, 415 bp, Homo sapiens
cgagagccttccttcccgggtctctctgacgccctcggctccccacaggcctttcccctcgcgtcctccctccctttccagcaccttcactcggcctgtttttcttcctcctcctcggcactgagctgagacgcgctgagcagtttgctctcctttttccacttcatgcgtcggttctggaaccatatcttgatctgcctctccgtcaggcacagggcgtgcgcgatctcgatgcgccgccgccgcgtcaggtagcgattgtagtgaaactccttctccagctccagcgtctggtaacgtgtgtatgtctggcggcctcgccggccgctgggcccaaaggaggaacctgttacgcagagtggagatgctgaggcctgcggtcaccgggcccaggaccccctcccctagtcgaccc

SEQ ID NO: 590 - DNA, 167 bp, Homo sapiens
gctcggctcctgccagatggaaaagccacatgaagtggagaaacagccggattcaggattcacccccgaatcaaaacccgatttttgaaaggcaggaccttccaattcgggcaatcgctaggttctgcttgtaaaataacctctgaacaagtgtcatctgccttccg

SEQ ID NO: 591 - DNA, 239 bp, Homo sapiens
ggcagtccagatgaccacacaggaggacgggctcagtaacagagtctgctgatcccacctgctgaccgttgccctccacaggaagcacatgtttctgcttaattcctgccagcttttggctgtcaggtagggcatctgcaacaggcagttcccgagggctgccacctggtgctgtcagtcggcttcagaccaacaaggaaaaggggaggcattcatcgatgtgcttatttttctgtgtt

SEQ ID NO: 592 - DNA, 143 bp, Homo sapiens
tctggcagtctagcttctaagctgaggagtttggccttcgctccaggtgcggggactcgtggaaggatttgattcgcgcttgagaaagatcgctccgctcctgtaaggaagagagcgtgtaggggctgcaaccagagacacag

SEQ ID NO: 593 - DNA, 144 bp, Homo sapiens
ccagtccctgcccagctgtgagaactggggcaaatgatctcagttttttcacctgggaaccggaagtggttcctaccgagctgtgctctgaataatcggaaataatgtatacaaagagctcagcagctagaattcagtaactgg

SEQ ID NO: 594 - DNA, 163 bp, Homo sapiens
ggctgggctttgacggtaggaatgaaggaggtgagggtggcgcgccgcaggcctgggccactccctgagtagggcggcggcggcggcggcggcggcggcggcagcggcggcagcggctgcaggcctggccgattgtgaggagacagcggtacctcctgggccg

SEQ ID NO: 595 - DNA, 202 bp, Homo sapiens
taactcttcgctggccgaggccaggcgcgggcatgctccctcgcacccggccaggagaaaaagggcagcgggggatgggcgggcgcgccgggcgttgccaggctacggccccccagggagcgcgggggcgcgccgggccgccaggggccgtcaggggccgtgggccgcgcgcctccccgcccgcggggcccgccgctgccgc

SEQ ID NO: 596 - DNA, 238 bp, Homo sapiens
taggtgcgggccccagggcgcggcagggagcgggacaggtggcgggagagccgcgagcaggaggatgctgcggggccggcggcgcggggtgggcagggcgcgctgcctgcaggtcagagggcgcagcctgcggcggggcctcggggcgggaaagccgaggctcggggagaggacggcgggaccccaccccgcaggctaagcacagccctcgccctctcgcctgctgagggaaccttag

SEQ ID NO: 597 - DNA, 156 bp, Homo sapiens
tgcgctacagctgggccaatttttccctcccgctgtccttggccccgccgaggtctcgaactcagaccctagcccggcgcgacccaacccacttcgcagtcggagttcgcgccctgagttcggtctccagcttccccggctccgaatccatcgccc

SEQ ID NO: 598 - DNA, 311 bp, Homo sapiens
ggggcagaggggcggagacctctggaggaaaccgtagctcctcggcgtcgcttcctcccccagcgctttacctggagcgttccctcccgagcccagccaacagcaggaacctgtacggaagacgggaagggcccggtacgcgccgtttgcaaaccccgcagaaaccagcggcgccaccagaaggttccgtctgtggagaagggcggcccgcaagccggacgagagcgcccccaaacggaaccttgagcccaaggaccccggaggcatcgtcgaccgcaggccgccacctcccggctggagaaggagttgct

SEQ ID NO: 599 - DNA, 147 bp, Homo sapiens
gcaccgcgaacacggctgacagggcagttgggcagcgaggtagtcgggaaagagcagggggagcccagcggctccgttgcgccctctgtcggccgccagcctccattgcacgcggcgccgcccacctgcgcactgggaccccggccc

SEQ ID NO: 600 - DNA, 278 bp, Homo sapiens
tcccgacgtcacacgcgcctgctcgcacttagccacgcgcttggggttattctttacactcaggactgaaacttcgcccgcgagaccgcggggcgcggaggagggccgaaacccaaggtccaggtccagggcccgcccccgcgcgcccgcgttggcgcccgcgcgctccctccgcaggggttagcaagattgcgctcattctcgccccggctgctccccacccgctcgctgctctggggtaccaggtccgcggccgcgttcccacgcctcggctggag

SEQ ID NO: 601 - DNA, 535 bp, Homo sapiens
acgcacacacgggcggacacacacacacgcgcgcacacacacacgcacagagctcgctcgcctcgagcgcacgaacgtggacgttctctttgtgtggagccctcaaggggggttggggccccggttcggtccgggggagatggcgcagcccatcctgggccatgggagcctgcagcccgcctcggccgctggcctggcgtccctggagctcgactcgtcgctggaccagtacgtgcagattcgcatcttcaaaataatcgtgattggggactccaacgtgggcaagacctgcctgaccttccgcttctgcgggggtaccttcccagacaagactgaagccaccatcggcgtggacttcagggagaagaccgtggaaatcgagggcgagaagatcaaggtgatccagggggtcaggtccaggaagggtgggacccgggaggggacctcgcccgaggcatagctctagcggttgtcgtcgtccagcgtccagcgcgtggcggtttcgcctcttgctgagccgaggaccctcggctcc

SEQ ID NO: 602 - DNA, 153 bp, Homo sapiens
cccaagccctgctccacggcccgtgctggttcctaatcgctgctttgcctgccttctaccctggtggtgagaacagtgcgcttaatttaatgccctgtctcacgtgctgcatgcacctcggccccagctgtgtcatgcctcctgagcaatgca

SEQ ID NO: 603 - DNA, 465 bp, Homo sapiens
acccactcccaccccaggtccacgcagatgggacccaccactctaagcaggatgcggtgcgacccaagcgtctcgtgtgaagtctgcatgtgggagaggaacatcctgtttgcctgtagtggctctgaggctcagacttcaaagtagagaagaaaaaaggccggtgctgggggcacccagggcagaggaggagggggagggaaggaggctgcttcggctgggaggaagctcaggggctgcaccgggctggcaggactcgaccccgagatcccgagatcccaaggctgccagcaagcctgaggggagggggctgcgaactatttattaagagcataagggccactccctactggggcaggtgtgaaatgccccacgagtgcagaagtccctcaggcagaggtttcctcctctgagagcccttgcccatctcccgtgctgctgcagtgactgggaggcagctgtggc

SEQ ID NO: 604 - DNA, 139 bp, Homo sapiens; identical to SEQ ID NO: 60

SEQ ID NO: 605 - DNA, 1592 bp, Homo sapiens
agctgcgggtgggcaggcggcctcggaacctgccttgctggcttcctcgaattggtagcgatcagttctagccgccgtgcccgcccgaatttgttcccaggcctctgctcctcaacaaacctatgaattctctcccggctggcagcggcccttcgcccagcgcttcgcccagcgcctgcggcctcccgggaatcgcccgggctcctgccttgggctggggggtctcccagaaggcccctttctgcagcggggccggcctccctccccgatcctgggatggcctgcgggatgatcccgcactcatctcgtccactcccttgtgcccgcggtagcgcagcatttcctaacttttccacgagggaacctctccgccctggccgcgccggcaagttgtgctgaaaaaataaagtgaagtcagattcctgagggtccgcagtatcccattttaaaatcaaggccctcgatcccagactccactttcctggcgcaaagaaagaaaggcaccagaaacccgggtcgtgggtgggctgcagaaagaaggtccaggaccctcctccgattgtacgcaaaagctgtctggtgagcaacatttcaatttctgtttagcggttctcatcagatctttaaaaagattcgtaaatccaaaggagatttaaaaacagagattatctgcttgtctctctgttctgtctaccataaaccgatttctcaacttcctaccagacccaggagcagagccgaagccgcccggggctttgttaggccggggggaaacgttttttggtctcttgcttctgatcctttcaatccggcatttcctctgaacctccgattggacgcggggcgcgggagcctggcgacaacaccaggcatcttacattctgaaccccccgccgcagcccagccctcggcccaagggcgcgtgtctcctcctcctggccctgagtttcttggggacgaaagcgacccaggaggggagaagggggcctgtgtttcctcctcacctttcttttcggctctagggtccttggctgggtcggggtcgctgtaggcacgtggatagaaggcgggggcggcgggaaaggcagacgcacacttggccggtgaaggcgcgcggcccagctctgcgcgcagctctgggaggcccggcgcagccgcctcgggcccagcgtaggcctctggcttgaaggcggccagcatgcaggaggagggcgccagggtcgcctccaggcgggcagagagctctccggcggcagccaggctgcgctgctgctgttccaggtttaggatgtctttgactgagaagggcgtgggcgtgagagcagggctggggaacatggtggcagcgccagtctcacagcgccaggtgggcggcagaaagcggcgctgcccacggcccctggcagcttccctgcatggtgccgccgcccgcccgcgcacccgtcggccagctctggatgtgtccgggcagcaggtagcgctgagcacaaggggcaggagaggcgggaccaggccagaggagggggactcagcctgccattgggccaggggcctcgatgacaggagcgatgagcagtttcgtgtcacctaat

SEQ ID NO: 606 - DNA, 154 bp, Homo sapiens
cattctcgggtctcactagacttttgcaagtcactgtgggaaccctcaaggcgagggtgttccgcactctggcggcgatacaccttcctattccctgacctaggccttcattcccccgccacagaaagcgctggaagcgcccaacctggatact

SEQ ID NO: 607 - DNA, 622 bp, Homo sapiens
gggcttcctggatgccctgtcctccggctccgacgcctcgctctcggtgtcctccgactcctcctcggactgttcgtccgaagcctcctccgacccctcgttggaccccatgttctcccgggcggccaggagcgccaatacctcccccagtttgcctttggggtatttgtacttcccgccttcccaggcgttttctttttcctccttcatcacctccgccatgtcctgggcagccaggagcgccaccagctccagaagacccccttcgtcctcacggtgctcgctccagcccccgaagaggccacgcccagccttcttcgcctggggagggagatccggctgcgccaaggtggaaatgcactcccggaggtccccgtcatccccggccttgcgcaggaccacggcgtccacctcgcggcccgcctcttccaccttcacgcgggtcccgttagtgtccttggacatgacggacaagacctgtcggagggggtctcgcttgtctttctcgtcgctccagcccagcgactcgataacagaagcgattttcaacatctcctcccgggcccaggggtccgacgggtcggtataggccacaatggccacgaactcaggattatccaac

SEQ ID NO: 608 - DNA, 180 bp, Homo sapiens
gctctcagaagccccagagcctcacaatcgagttctcctgagacccccattggcagggagatggcagtcctggggctggcccacgcccagcaagctccccagccagctgtgctgaggcggcaagtgctaaaaataacagtcacgtcttgcagggacacaggctggcccagaggcagatgg

SEQ ID NO: 609 - DNA, 182 bp, Homo sapiens
gacagccgcggtctcgagtcacagggacacggagatgccgccgcacggagaccggcgagaacagaaggtcagaggcgggcggaccgagctggtcagcgccgggccgcggcggccggggcggggaccggggaggctgcgcggggcccgccccctaccttggtcatgccattgcccatgatccc

SEQ ID NO: 610 - DNA, 585 bp, Homo sapiens
ggatgggtcccaggctcttaaaatcgtgtgccaccaacgtcacaaccgccatcatgatgtgtacgcatgtttacaagaaatgttcagcatccatccgcccgagctctgcatccgactggagactttacacctgcttcctacgaagagggagctcttgccagcgagcccatgcttacccataatctacgaagagatcttttcatctcctctccgtgaacacttggggaggggctgggactccaggcgacacggaaacgccaccacacgcacactcgacggagcacaacactttctgagctgccatccatttttaatttattggatccaagagaaaataacaaccgtagggaggggggaggagaagggtggagggggagagagcaggaatcaattcttggtggagaaaataatctatgactagatgacgcttaaaggcacgacaagagattttatgaagttcccctaacggagggaataatgaagtgcctggcagagaaggaaatggagataagagggaggctggtgtcaggaggatgtccacagggggtctcgaagggttattaggacacaagttgggggtgggga

SEQ ID NO: 611 - DNA, 132 bp, Homo sapiens
accactctgacagcccagagctgagaggcgccgggacgtgccggggaagttgtggacgtccagccagaggacgctggcgggcgggtggatggacaggacggacggccattgctgggcccagccccgcccctc

SEQ ID NO: 612 - DNA, 205 bp, Homo sapiens
agatcaaagttatctgggcagggcgaacaaacgggacctccgagtggtacgtccttaaggcggggcgggaatacggcaacgggccgcgggggctgttactgtcgctaccaatcaagagtcgagatggctttgatggacaggcatagcgcgagtgcgggctttcgcccaaccggcgggccgctgtcccgaaaaaggaccaatgagg

SEQ ID NO: 613 - DNA, 177 bp, Homo sapiens
ctattgcaaccactactggcaacacctccgtagtagtctattttagtcaaggttttttggctataaggaacagaaacccttatgtcaaaaaaagaggtggtagggttgaggtttgctgtaagatcaaagaagtcatttcatggacaacgacaagcaggaaataagagtatagactgg

SEQ ID NO: 614 - DNA, 329 bp, Homo sapiens
agcaggtgcaggcctgtgcccccacgggcgcctgaccggggcctctgtgctgcagagcgcaatttaatccggattcagtccaggccgagtgctgacaaacctgcctcccccgggggttggggcggctcaggctgtgcggcaggaagtggcatagggcctgtgctcagagcacctctgggctcttgctcggcctgccgtcaccctcggaactcttaatactcttttgaacaggaaccccacattttcatttcaaatggggccccacccatcgcgtcatgggcccctctagggcgagacgccaggcctccccgccagcgggctggaagcat

SEQ ID NO: 615 - DNA, 323 bp, Homo sapiens
gccagggactcagacagtcggcacaaaccccctcccggggtctaagcccgcctagtacagtacctgaaggggcagcgccacctccgcccgattgtgctggctgccccagtggcggcggtcacagctcgggcgccaatgacgcctcttataaaaacaacctgctcgcaggcgtctgcagccggcaggcggtgaccggctgggcgccgcagtgcatgccgtgacgcgtagtcccgcctgcgcctcctgcccggcagcggtgaagagaagaactaccactcccgaagtggagcgcaggccgccgccgggcggctgcgggaagctgg

SEQ ID NO: 616 - DNA, 74 bp, Homo sapiens
tgaatagattaaatggataatcctttgtggggagttggaagtgtctttgcttggaaggtacaattcaagtaacg

SEQ ID NO: 617 - DNA, 145 bp, Homo sapiens
atacctgggccttgtccccctgtccgcaccctttccctcgggggtggggtcgctgagtcagcaggcaggctgcggtcggctctggtctccgctggggagccgaggcctctcccgcagccgccgctgtggccccagcccgcgggaa

SEQ ID NO: 618 - DNA, 145 bp, Homo sapiens
ttgttcccggtttccgaagcgcgaatcccgaacgccgtgagaaacctcaggctcgggcggcagcgcgggagtctggggcgctggaggccggcgccggctgcggaggaggagcgccctctagcggcaggtccgcccagggagaggc

SEQ ID NO: 619 - DNA, 147 bp, Homo sapiens; identical to SEQ ID NO: 349

SEQ ID NO: 620 - DNA, 311 bp, Homo sapiens; identical to SEQ ID NO: 250

SEQ ID NO: 621 - DNA, 143 bp, Homo sapiens
tgcgggtgagggctgcagggagcccgcgaacgacagaaagtcgccccccgcattccaccggagcactcgggaacacggcttccaggtgtcccagcggccgcgcctccccgcccccggccctcccccgtcgcgggcaggttcaa

SEQ ID NO: 622 - DNA, 154 bp, Homo sapiens
gtccctccagctcagtctaaaccttccagactacagtcttccaacagtctccgcttcgcccagcagccggggctagtccgagccgagcgaaccctaagctacgggaaccagcttcttggtgctgtcccaagagtggagaggagacagatgaacg

SEQ ID NO: 623 - DNA, 318 bp, Homo sapiens
cccgcaggcggaaccttagagcttcagccatggaaattaacctcttccggttggggccggaagtccctccgagaggggcggctccgcgtcatgtgactggagtccgcgtaggaggggtcggaggtcttacccaacagattgacgcggcgttagtattggccgtgtacccgaaaaactgattgactgggctggcgttaactgtgcggaggcaggtatgtgaggggctggggttggggcgggggcgccaaagtttagggacgggggcgggagacccgggtccgccttcccaggacacacgggcttgaacatctgagccca

SEQ ID NO: 624 - DNA, 150 bp, Homo sapiens
cctttgatgtggctcaggctgctgggcagaggaaacccgagcttcccagagcagcctgctccatcaatgccacccagttttcaacgaggctgcataagacacggacccggtggacccgtggcagggcaatttctttatggacagagcggc

SEQ ID NO: 625 - DNA, 143 bp, Homo sapiens; identical to SEQ ID NO: 443

SEQ ID NO: 626 - DNA, 156 bp, Homo sapiens
ccccgaaggcgcgagagcgagcacgagagggaggtgcgcgctctgtacgaggagacggagcagcttcgggagcagagccggcgcccgccgagtcaggtgggcctcgggccccgcccctcccgccaggcccaatcccacctcgctggcctccctggc

SEQ ID NO: 627 - DNA, 175 bp, Homo sapiens
tcccgctgctaggacgcatgcgcgccgcggccccacccctgcgccgtgccccgccccgcgcctcctgtcggcgcgtgcgcattgacttacccgtgccgcgcggacgcactactgtcatttgccgccaaaaccccgcactcaggagtcctggcgggtgcagcctcccagacggctt

SEQ ID NO: 628 - DNA, 136 bp, Homo sapiens
gcgggggtggggctgcccggcgcaggggctgggggcggggtgtgcatgcggattgattgggtgggtgttgctgtgattagtcctgactgtgtagatgccagcaacatagtacacatagcttttcgagcgcctagtg

SEQ ID NO: 629 - DNA, 209 bp, Homo sapiens; identical to SEQ ID NO: 90

SEQ ID NO: 630 - DNA, 1736 bp, Homo sapiens; identical to SEQ ID NO: 173

SEQ ID NO: 631 - DNA, 138 bp, Homo sapiens
caaagctcgaggccgctggattccttgcttctcccccctccacccgcggtttaacggtctcgggggccggggctccgttatgttttgaaacaacacgtcggacacctcttgcattttcctagttatgaaccctcttgg

SEQ ID NO: 632 - DNA, 145 bp, Homo sapiens
gctcactgacctggagaggtgcttcaagatttgtttcttgatgatcccggccatggtaccgaggctggagacgccgcggtctcgtcctgttgctcactgcctcctctcttcgtggccgtctcctctctgtcccggctagcccggc

SEQ ID NO: 633 - DNA, 217 bp, Homo sapiens; identical to SEQ ID NO: 26

SEQ ID NO: 634 - DNA, 128 bp, Homo sapiens
atattctaatcgggcgccagggacagacctaacggcctttacagtggcgcatgcgcaccaggctagggccgccgcgcccctcctcaggtgttttgtgttcctgccaagtcaggcttcggccctggggg

SEQ ID NO: 635 - DNA, 143 bp, Homo sapiens
agaggcggcgcgccggttgagcagggcgtctctaggcctggtcggctggcggcggtgagtgggccccaggcaagggcggagggcggaactttggggttcggcactgccgggcggccggaaggtacggtggggatagctctctg

SEQ ID NO: 636 - DNA, 986 bp, Homo sapiens
agcacaccctcttcattcagctgagcgcgggactctgcattaattcaaggtaagccccgggtttttactgccagagatgtgtctgtcttgcgccccgcatgcactgcctgcggggctgcgctgcactccccggcggcgccacgggtctggcccccgcgcttctacgtgttggggggatgcatggaccttggagatccgtagttggccctaaccttctcggaatctcctctgcacgcgctgcctgttcctcctctgcacgctctgtccgttcctttgcaacttctgtgggaattgtcctggcgtgggaaacgcccccgcgctctttggcacttagggtgtgagtgttgcgccccttgccgcagcgctcagggcagcatcccgctcgaggatgcagggttctcaccaagcagtgagggggactcacgcgccgccggggagcggagccaggctccgagaagggagcaggctcgagccgctgggttttcgcaagccttggggcctctggccgcccttccatgcctccgggcgcgggcggctcagcaggtccccggcttcgggaagttttgtgcgcggatcgctggtggggagggcgcgcgggccagtggctgagcttgcagcgaagtttccgtgaaggaaactgcatgtgcctttggaggcgactcgggactgctgtagggtggactgggtgtctatggagttgcgggtcagagcgagtagggtgggtcctttcctgggacaggactgggaattggggctcgaagtaggggaggaaagagcacagaggaagccaggctgcatagggtgacttgctttttgatccggcttgagtctccttgtgcgagagtggttgtgcgtcctttcccagggatggaacatccagttttctgtgcttttttgctttgtgcccatgtcttggagagaataatgggagacactaacccaccgacgtctcccttgagatcgcggcttcctccttgcgcagagga

SEQ ID NO: 637 - DNA, 384 bp, Homo sapiens; identical to SEQ ID NO: 420

SEQ ID NO: 638 - DNA, 171 bp, Homo sapiens
cttaaaccacaacactggtttgttaaatcaaccgacccagttgttctgcaatatatcccacttaccccactgcggttcctgtaaatggaaaccttttttggctgaaatacatcagaggcaacgctttataacttaggagatagtgacattattgtgagagatgcatagcct

SEQ ID NO: 639 - DNA, 139 bp, Homo sapiens
cactaacagctgcaaacccctgccatcgctgcagacagcccatgacaatcgaggtggggaacagatctgctggggaggagggtagggccgagggcgcagctacaggaaggagcaagggggagttctgcacgcccttgtg

SEQ ID NO: 640 - DNA, 124 bp, Homo sapiens
ttcagctcggcgggctccactccgtccccctcaaataaaactaggggcgcaactgttatgcatgtgccgagagaggcccggatcttccttccttccacccactcctactcctcccaccccgcgt

SEQ ID NO: 641 - DNA, 141 bp, Homo sapiens
cacctcccggatctgcgcctgcttgcagcggattgggggactcgatccggatactgtcccacggccgctcgtccagaacactggcggcctccgcggtgtcccagcctgtgaccccaaatccgctcgagagcgcctgagccc

SEQ ID NO: 642 - DNA, 322 bp, Homo sapiens
gtgtgctgaggtccctcggcaagggacgctgctttcccctggcagccacactgctgagcataaatgctttaaagtgtcagcaattgatgtgtggagagaagtatgactgcattacagcttaaagagctttcacattcaggtctctacaggagaagacgagatcgccccgatagtttgagagtaaatgggttaccagaggaagagctaaggtgagtgcaaagtcatggttggctaaaggtcaagacatctaatctagtaagtgcagtggggattcatgcctaagtggatgcagcgttgggaagtactcattgaaaagtagcct

SEQ ID NO: 643 - DNA, 141 bp, Homo sapiens
gaacggagtggccggcgccggcgaagaagacccggctgcggccttcttggcgcagcaagagagcgagattgcgggcatcgagaacgacgaggccttcgccatcctggacggcggcgcccccgggccccagccgcacggcga

SEQ ID NO: 644 - DNA, 145 bp, Homo sapiens
gggagcgaggccggggagtccgctccagcggggcgctccagtccctcagacgtgggctgagcttgggacgagctgcgttccgccccaggccactgtagggaacggcggtggcgcctccccagcaaaccggaccgactgggtaggg

SEQ ID NO: 645 - DNA, 144 bp, Homo sapiens
agcaggaggttccaacgaggctccctggctggctgcggctgcaccctcgagggttgttatagtaaccacacagacgcacgcagcttcgcgtgtgtgccgaggaattcacgggcagtacataaactggactccctgcttcattcg

SEQ ID NO: 646 - DNA, 141 bp, Homo sapiens; identical to SEQ ID NO: 494

SEQ ID NO: 647 - DNA, 142 bp, Homo sapiens
ttgagcctgtatacagaagcagcagacatcgcattgagcaaaagggtaaaggctaacagtaacggagtcttatgtttgtacagcagattgaaaagctatgatgaaacggaaggcctgtaatgttgcttataaactgtggtac

SEQ ID NO: 648 - DNA, 143 bp, Homo sapiens
gcgggcagccccgcgtgtcggattctcccgctgaggaggagtggggtggcgccggggcgggaaggagaagaaggcgaaggaggcctggcagtgcccgccctgccctacccagcctccgcgggcccctgcgcaggcagccgtaa

SEQ ID NO: 649 - DNA, 135 bp, Homo sapiens
ggctcctcctccaactccgcagacctccggggaggcctcttgctccccgaacacccgggagttcgctttcatttttaacgaatctccacaatctcttgtttgggagataattgcttctttcaggggcttggagaa

SEQ ID NO: 650 - DNA, 139 bp, Homo sapiens
catcggcaagtacctgatgggggacctgctgggggaaggctcttacggcaaggtgaaggaggtgctggactcggagacgctgtgcaggagggccgtcaagatcctcaagaagaagaagttgcgaaggatccccaacggg

SEQ ID NO: 651 - DNA, 271 bp, Homo sapiens
ccagcctctcctcaggtgtagcccgctctagaaaggccgcctcgggagtaccacccactcctgacggggcggggagttctctccgaccccacccgttccaaggacgcagccctgtgattggccatgacgcgtgccagagctgcccagtcgcggaagagcagctgttttggcgtctgtttgctgcggtaggaacatggcggatcggctcacgcagcttcaggacgctgtgaattcggtgaggaatttcattcgattagcctctgtctttctc

SEQ ID NO: 652 - DNA, 357 bp, Homo sapiens
ggcctggcgcggatcggtgcggggagccggaggcgcagcgatcccagcggagggagcggcgtgggggcagcgagcaccgcgcgcgcgcccgtcgccgccgccggagcctcggggcgcgtgcgcgcggcgggggcggggcgcacgtgcgtgtgtttgtgtcggagccggccgggcggacgcgcgcggggtcgttccctcaaccagcgagctccggacgctgagctaaagacgaaaattggcaggaagagcggcactggccccttaggctccgctataacttcctccatcccccattcccccatctcccagcacccttctcgctacacagaccggctctcaggaaaagtctaactaaag

SEQ ID NO: 653 - DNA, 136 bp, Homo sapiens
ggacgacccatctttcaggatctttgcaaggactgggtgggagcccgtaggcagagcacctgccggggcagccacgcggctctcaggaagtatctgcctcgggcaagccacttcctgcctctgggcctcggtttcc

SEQ ID NO: 654 - DNA, 151 bp, Homo sapiens
gggtttccgctcggggcgggcgatagagacagcgcgtcgcgcctttagcttctttcccagactccggcccagctcctgcgatctccacagcagcctctgaggccgcccccagagagcatcaggatggctgaggtcaggagtcagcgcccct

SEQ ID NO: 655 - DNA, 154 bp, Homo sapiens
gcggggcgttcatgtctccgcgggcccggggctgagcgctgcggagccagaggacgggcggggcggggggctcgggcgccctcagctcggcctcagctccagcctgggtcgtccctgctgccgccgcgcccggctcgcctcgcgccgccgcctc

SEQ ID NO: 656 - DNA, 147 bp, Homo sapiens
ggctgtcgcctggagggcacgttcaggcagaagctcctcagtggccacaagtccgctagctccggctacagcccttgccgcacactcgcgtcacctgagcctgtgtaggtgcgccccccaactcctcccccagccaggtcccgggga

SEQ ID NO: 657 - DNA, 250 bp, Homo sapiens
tgtcgattggaccttgcaggaagccccgcctcatcaactcagtcaagggctttagttggcccggcgtcggtgagtggcgggtcttagctccgccctggccgtccgctgcgctgcctgggtcggcgccgtttccagttgagagatggcggccgccgcaggtagatcgctcctgctgctcctctcctctcggggcggcggcggcgggggcgccggcggctgcggggcgctgactgccggctgcttccctggg

SEQ ID NO: 658 - DNA, 144 bp, Homo sapiens
acactgtaaattatactgctgacggcgaggaacctgcttggcaatgtggcaaggggattttatccactcaaccaacacgtctgagtatttccgaataggttttattaccaggtgcttaaagaatgtgtggtgacataaatgggt

SEQ ID NO: 659 - DNA, 146 bp, Homo sapiens
gcacaagcttgaattaacttatatgaattcatttagccctcacaacgaacctagaggtaaaaaccgtgctaaaagtcgtgatttgagcccagagcaatgtgggtccacagtccctgctcactgttttagaatggaacacgtccttc

SEQ ID NO: 660 - DNA, 133 bp, Homo sapiens
gggagagagaagctggcttttgcacccgcagctcagggccccagacgcatcgcagagccacgggtgcccacgagcagggtcagctctcgggggccctcttccgcagcccagacccgggacaggaagtgaggga

SEQ ID NO: 661 - DNA, 167 bp, Homo sapiens
ttgggagcctggggaagcttccaggagcttcagggttcccgccaggccacactcatctccctgcccctttgaggttcccgaccgaggcaaggggtcttgtgcaagtcaggtttgtagatccctagtgaccagacccacgggagctgctcattacatagcaataggat

SEQ ID NO: 662 - DNA, 150 bp, Homo sapiens
aaacccagcggagggcgggaagaaggaggaggcctctagggtggtcgggggactgggggccccgccggcagaggtccctcggcctcctgactgactgactgcggccgcctccggccaggacgctgggagctgcctgcgggaaggtgcggg

SEQ ID NO: 663 - DNA, 258 bp, Homo sapiens
cactttgtaagaagcatcgagcgtggaaaaggggctggggtcagcactggggccctctgccgggaagagagactggcggccagcacacgcgtctccccaggctgaaatggggcaccctctcgcggcccttccctcccttcccgggctgggtggcaggtcttggctcttctgcgagtaccccgcggctgcggtctcccggcacccgctgagcagcctcgcccgccttcctctcccacccgcccctgcgtgctctccggg

SEQ ID NO: 664 - DNA, 434 bp, Homo sapiens
gctgggagcaataagcagtgctgaaaacgcgatgcatttcaacccaaagcactctgatccctttccaggctttgggagaatgttttttccagctcggttacttgctggcatgcataggtcaatatacaaggtgttctcagagaagccggagctgaatgttgacttttgtgctccctggggtgtgttctggggaggaagtgggttttcaggttgtggtgcgtgtaggatgtggtctgggatgattagtatcacacactgtggataaagttaacacgcattgtggagcttttttcctcttttgtacttttgggcgaaggtgcctcaaaagcagctttgtttatcaaggaggtgcccttgattctgtatgcatttttaacatctgaatagaagttagacgcacacataattgctttacttgatgcagtaaatacgtt

SEQ ID NO: 665 - DNA, 138 bp, Homo sapiens; identical to SEQ ID NO: 575

SEQ ID NO: 666 - DNA, 179 bp, Homo sapiens
cgcacagcagctgagctggctcttgatgcggctccagcaccctctgcattacagtatttacataagcccaccttcccaggctcggagggcccccacgctgccaagcctccgtcagctatcagtgattctggagcccttcctaggagtctcatcggttgccggctgctgaactcaatcag

SEQ ID NO: 667 - DNA, 1353 bp, Homo sapiens
caccaccgctccatacttctggcgagtagcggcggcgggaacggtgcgggaggcggcggcggcgcgggaggcggcagcggcggcgggaacggtgcgggaggcggcggtgctggcggagcaggcggcggcggcggcggcggctccagggcccccccggaagagttgtccatgttccagctgcccaccctcaacttctcgccggagcaggtggccagcgtctgtgagacgctggaggagacgggcgacatcgagcggctgggccgcttcctctggtcgctgcccgtggcccccggggcgtgcgaggccatcaacaaacacgagtcgatcctgcgcgcgcgcgccgtggtcgccttccacacgggcaacttccgcgacctctaccacatccttgagaaccacaagttcaccaaggagtctcacggcaagctgcaggccatgtggctcgaggcgcactaccaggaggccgagaagctgcgcggccgcccactcggcccggtggacaagtaccgcgtgcgcaagaagttcccgctgccacgcaccatctgggacggcgagcagaagacgcattgcttcaaggagcggactcggagcctgttgcgggagtggtacctacaggacccctaccccaaccccagcaagaaacgcgaactggcgcaggccaccggcctcactcccacacaagtaggcaactggtttaagaaccggcggcagcgcgaccgcgccgcggcggccaagaacaggttagtggcggggcccgcggcctggctacagcctcagaggcctgggaaggggagaggggttgagatggggctagcggagcggccgctgagagccagggaagccgtgactcctggccagtcggagaaagtttccgcttgtccgggacgcgcggaagagggggccgggctggctgtgggtgtattgattgctttgaccaagaggggctttcgtcagggcagagagtgtgtgcttgcgacccgagtacccgcagcccctgggagacttagccctgcgctgcacccgtgcctgcctcctcagccctgccgccagctcggcgatcctctggagcctagagacagggagggaaggaaagcactctttgccatctggttcttatttctgtgcgttgcaaaaccccgagagaaatccactagcgtcagagagaggaaagtgaacctgggtccctatcacaaggggaaaaggccagaggccactgcgcagcgggcctgtttccccgcaacgctgcacgttgcctgaccgggagcaggagagccgggctgggagtggagaggcctagcgtgtgcgtgtgcgtgtgtgtgtgcacgcccgtgtgcatgtactcgccctcctgtt

SEQ ID NO: 668 - DNA, 137 bp, Homo sapiens
gcatttctatttaatcagcagacatgtcaggaaatcgctgcccaagtcgatggatactacaagccgaccggcgctccctgcagaggctgtgctctcgtggacaagctggaagctcccggtcatgttcattcacatgg

SEQ ID NO: 669 - DNA, 134 bp, Homo sapiens
gctgagccgccgcggacctctcctctcctgggtccggcggcgccaggagaaggcgacggcgtccagaccccgccaagacggagaggggaccgcgccctcccccgggacaccccaggatccctggaaaatccccc

SEQ ID NO: 670 - DNA, 159 bp, Homo sapiens
gaactgcacctctggagcgggttagtggtggtggtagtgggttgggacgagcgcgtcttccgcagtcccagtccagcgtggcgggggagcgcctcacgccccgggtcgctgccgcggcttcttgcccttttgtctctgccaacccccacccatgcctga

SEQ ID NO: 671 - DNA, 146 bp, Homo sapiens
acctcattttgcagagaaagagaggttcagagaggtgaaattgcttgcccacgatcacgccaggaagtgggggagtcagcgtttgaacgctgccaggctcagctgctctgagtgcaactgctgggctgtcccagataactcaaccc

SEQ ID NO: 672 - DNA, 145 bp, Homo sapiens; identical to SEQ ID NO: 370

SEQ ID NO: 673 - DNA, 285 bp, Homo sapiens
taggaccccatgtctgggctttctcggaacgactccctgccaaggaaccagagcgcctctaatagcctggagcctctaaaagctttgaccacagctcagcttgctccctgcaagccctttgaagcgcttccttcgaacttgctttgcatattctggtcagatctgaatcagacttgcaggaattacccctctcggtaagtctaggtggctgccttagcttgtcagtgacacacgaggcaggcgtgctgacgtaaggctgagacgtattcgattccaccctctgcg

SEQ ID NO: 674 - DNA, 399 bp, Homo sapiens
ggctctttcgtaaaaacgcggtctccgcacccaaaggacactgcggagccgccttaatcgtcgttcttttagcacatttggggaaaggaaggcccaagttggggtagggacgcttgcagcccgggagggtttctctcaccaactctttccgcaacccggtccagacccggccagcagagactggaggcggcttccccgccccgcactccctcggcttggcccaggctcagctgcccggggcaccttccttgccgagaggcaattggactctgccgggagtgggcccagaagttgaggcccaggaagaggcctccgagcttcccccttttgttaggtgtagttacacacgtgaaagaacagctttcgccccgacctccagggctaggaatggttgccagg

SEQ ID NO: 675 - DNA, 139 bp, Homo sapiens
agtccgaccaggtgccccctctgctcggcctagacctgagctcattaggcggcagcggacaggccaagtagaacacgcgaagcgctgggctgcctgctgcgaccaggggcacaggatagagctgcatctcggtccccac

SEQ ID NO: 676 - DNA, 1596 bp, Homo sapiens
ccaggggcttccaggcaggtgggcgatcagggcccctaggccatagggtgcctctgttcaaattagaaaaaggcgccccctcagggcagactcagcccagctgccaggggacaagtcctggctaacgggagctggagctgggtttcacctccaggtgcctccttggcggggcgccccgtgcaggctacagcctacagctgtcagcgccggtccggagccggagcgcgggaatcactcgctgcctcagcccaagcgggttcactgggtgcctgcggcagctgcgcaggtggagagcgcccagcctgggaggcagtagtacgggtaatagtaggagggctgcagtggcagaagcgagggtggccgcagcacttcgccgggcaggtattgtctctggtcgtcgcgcaccagcacctttacggccaccttcttggcggcgggcgccgaggccagcaggtcggctgccatctgccggcgctttgtcttgtagcgacggttctggaaccagattttcacctgcgtctcggtgagcttcagcgacgcggccaggtctgcgcgctcgggcccggacaggtagcgctggtggttaaagcggcgctccagctcgaagacctgcgcgtgggagaaagcggcccgcgagcgcttcttgcgtggcttgggcgccgccggctcctcctcctcctccgcgacgcctgccggcccgctgccgcccccgccgccggccccgctgcacagcgcggacacgtgtgcacctctggggccaacaccgtcgtcctcggtccttgggctgcggtcgcctgcggaccccggtgggaacagaaacaagagactgtcagcgccacagacgaggtgaggccgggcctcaactgcaggggtcacgggagtggggcggaaatacactttgatcccactcaagcggagcggaggtctgggaggccctgggcccgggagaccagtcttagactcttgccccactgggtatcccatctaggcctcttctggggagggcggcagactcagccgctgtgtcaacgctgtgttgtcgagaccagctccccaccctctctgggccccaggctcccctcagtaacttggggcactcgacccgagcatccgcgaaagccctcccggctctcagcgttgagcattgggattctagactgcatttccgtctctctgcttgggttcacgcgcctctccacacttagttcacacgcacacacgcgcgcgtcctcgcagcacacacttgtctggtgcaggtaagggaaggtggaggcggatcctggggccaaaggtatttagaatctttcaccctcagccgcctgggattgctgtgagagacatggaaacaggctgagccgaggccttagatgagaggatggactggagagtaaagagggagggttgcccctgcatcgagtttttggaccctgatcccacaccagcttctcggtctcgtacccgcccttccgaagaactccagcagaaaggtccagcggtcccctgtgcttgaggcctacagaagcttgtacccaactagggcaggcacccgggtcttccagaccacaggacaggacaggccacggctgaggaggcctc

SEQ ID NO: 677 - DNA, 157 bp, Homo sapiens; identical to SEQ ID NO: 554

SEQ ID NO: 678 - DNA, 139 bp, Homo sapiens
tcccagatgaggaaggagctgggtttacgggaagcctccaagtttcgggaaccacccgcgttcacaacaagcgtgacggtgaatttattattttcacgggaggcaccgcacccgcggttcacgctaaaggaagcaggaa

SEQ ID NO: 679 - DNA, 145 bp, Homo sapiens
aataaggcccgaactgcagcagtcggagccgatccctggagcccagcgcctagggcggacccgcgggagcgtctcttggtaaccgttgctaaggagaggaagcccgggaaggagctttcgcgcctgcgccgcggggccgtccgcg

SEQ ID NO: 680 - DNA, 550 bp, Homo sapiens
cagcctctgctcagagagcagcagccgaggggagggtgacagtcaagggtgagcgggaggcagcagggaaaacaatgccacttctcactagatttctaattggttgtcactgcctgtcggagaatgatgacaaacgccacacttgccctgagagggctgcagtccaggctgggctgtgctgagaaacctcgtccggcaggggtgtcaggctgtaaccacctactcccgcacggggccagcttgcaaatttattttccagaccttcccgacatcaattggcccaacattttcctaacagccaaagctcacgatctgggcaagcgaaggagaagcaggagctcagactcattcatgggtttccaattaattcacttaacaaatctatttttcagccccaggttcaagaccttggtcgaagccagggaaaataagaggaagtgactcaaagatgagtcagatggagctgttgcccgcctcccgcccgctcacagcgtggaggagagatgacatatatataaataagcggggaggtgtggaaaatgaggagggc

SEQ ID NO: 681 - DNA, 221 bp, Homo sapiens
tctcctgggtcctgcctactgccccatcccgcagaagtggcacgtgccaccggagctagtaagagtgctgtcggcgatgcttttcctgctgatcggctgcctgctctttgtcctcacgcccacgttcgtgttctgctatatggaggactggagcaagctggaggccatctactttgtcatagtgacgcttaccaccgtgggctttggcgactatgtggccg

SEQ ID NO: 682 - DNA, 146 bp, Homo sapiens
ttctgctgcccgcaggctgagggggcaggggagggggaacagggctgggaaactgccgtcagcgggtcccggccccgcctcccgaacgcaacgtccaggaaacctcagaactttctattgtctgagaagcttcactgaacaaattg

SEQ ID NO: 683 - DNA, 214 bp, Homo sapiens
tctaacctgtaaggaagtcttggctgggagttgaaaccccaggctagaaggcgacccttagactttttaggtctgatggcgggcctatgctggtgtgggaataacaccgccggtctcagctggaggtcgccagccctttgcaagagcctgccggtccccgcgggctgcagcacaccccggcgcgatgtgccctgcctgtgtctgccggaggctg

SEQ ID NO: 684 - DNA, 140 bp, Homo sapiens
atacaatctcttatctgagacccaaaaatagagtgaatatatcgtcctgtcctaacgaaaaaaagaaaaatgcattagaaagtgtctcaactgcttctgatgatgatatatatgcattcacaccagtgtaaatgtaagag

SEQ ID NO: 685 - DNA, 142 bp, Homo sapiens
gcggccatatagcagaggatggtttcgatccatcgacctctgggttatgggcccagcacgcttccgctgcgccactctgctgtctcgacagtccgctccgccactctgctgtttcaacattactcttgtcaagtatgtatta

SEQ ID NO: 686 - DNA, 124 bp, Homo sapiens
acccggcggcttccgggattctcgctttcctccactcccccgctttctcctgagcgcctactgtgtgccaggatctgtcctaggctccgggtagacagcagtgaacaagaaacaaacatccctg

SEQ ID NO: 687 - DNA, 390 bp, Homo sapiens
gcgccgtggcgggtactggactggcggagcccggggagtgaagtagtgaaatcggacctacgcctctccaacgctcgcgtgatcacgtggttggcacccaggcggaagtctgcggcagttctttgcggtgaagaacttgcaaagcgttgctggaaaagacgggagttctactgacactccagtccaaagctaggtgggaccgcctcctgtcgcacgtttccgcctggtcccgcgctttaggagctaggaaatgtgacagaggcggtgcctactgcctcgctaggaatggccgcggaggaggactggtcacgtggcgtggcttccggcctctggcgcgttcctattcgggaaggttttaaatgcggagtcatctcttgatttgtcagcgag

SEQ ID NO: 688 - DNA, 147 bp, Homo sapiens
gccaggctttgaactctgcttctggcttccgtcaactgacatagttgcccttttgctcaaactcgcagctccagttcgcactcgagagagctctgctgggtgtctgctgctgttccgcggcgggaacgtgtgggggcaacaacctgg

SEQ ID NO: 689 - DNA, 145 bp, Homo sapiens
ctcagcctggcccggccgcgccgctcaccctgctgcccggaggaatctgccatggctgggaatcccggacccgcagctgcggctacagacacttcctagaatctgatgcaaccgccgccccggaagtcgcgccccacgccgggcc

SEQ ID NO: 690 - DNA, 136 bp, Homo sapiens
agctcacacaatggtctccagcgctctggggcagggcttctgaggggcgggcctgcctctgccgggacctggagcccccgcccctcggagaggctcctaggctgacttgggcagagccctctggtgggccgggagg

SEQ ID NO: 691 - DNA, 154 bp, Homo sapiens
aatttgtagggtccaaaacctgtttttcctctgcgccccctcatctgtccgctcagatttgggattcaagcagagagcttgggtcgtgtaccgtaagcattacgtatttgggaaatgcagagtcgaacctctctatttaagctgtggcccatct

SEQ ID NO: 692 - DNA, 144 bp, Homo sapiens
ccggcgcccaccccgagggccccacgcgagggcaccacgtccccggcgtctccccgggctccaggggcagcagcgcggctcggagccctttacctgccaacgatcaccacgcagccggccgcggaggacgccatggttgggccg

SEQ ID NO: 693 - DNA, 326 bp, Homo sapiens
gggccccaggagacactcggaggggtccgcgggctcggcccggtccctccgctggggggttaccagccggccggcagcgagatacccagaggcccgtttttccaccgcgttgccatagcaacggcctggccggctgcgccccgggccgcccgccccatcccgcgggcccgccctgagccagtgactccagggaccactcaccgcggccggcggactggcgggtctccgacaggtgcgcacactcggcgcaggctgtcgctgagcccggaattctgcaccgggagaaacttttcagcccgcagagcaaccgcagggcagtggacggg

SEQ ID NO: 694 - DNA, 139 bp, Homo sapiens
tcagggccagcgtgtcggccttcgggcgctggtctgcggccatggtgggtggccgtcagtcggtgccgtgacgccacgcggagacgtcgccgcgcgggctgggcctccaaggccccgctccgggccccgcccctgcctg

SEQ ID NO: 695 - DNA, 196 bp, Homo sapiens
ggggggagagggcggtgattggtgggcgtggtctgggtaggggcggggctacatcgaagccggttgggaattccaccatccgagagagtctgtgctgcggagccaccgtctggtcgtcgggttgaaggcgtctcttgctttaccgaactttaactgatcgtagtctcatttatttccttccgacctagagcacctc

SEQ ID NO: 696 - DNA, 142 bp, Homo sapiens
cagccaggacaggaatgggggtggaccgagccatgaatacccgtggagagcggcctaactcggccacccactctgtgagagaccccttttccagctggactgtgccggaccctggtgtggggcccgccagccatatttctca

SEQ ID NO: 697 - DNA, 135 bp, Homo sapiens
ccgcccccggcatatcaccccggagcactggaacccgcccccgcttcttgttttggcactggtggtgcttgcggtgaggtccaaggagcccagcctccctgagtggaccgccgggcccctccccgttccgggaca

SEQ ID NO: 698 - DNA, 494 bp, Homo sapiens; identical to SEQ ID NO: 272

SEQ ID NO: 699 - DNA, 203 bp, Homo sapiens
ggctcagctgctgggtgggaggaagtgggcggggccagtcagggcctcctctggcctgggctgccccacccctgcatgccctctatgttcccggagctacttcctccttccatgacagcagcttcaagacccctcggtcctccctgcccccagtacttgggagacagatatggggtgggggtaccggaagccctgcccccagc

SEQ ID NO: 700 - DNA, 228 bp, Homo sapiens
ccaaagtagaagttgcagtccgcggaaaggccagcagagggcacccgcgcttcgtttgcaggaggtccgcgtcgagcgacaggcgacagggttgggaagaacgctggaaacgctggggctttgcttgtacccctgacccattccgattttcataaagctccgcatagttccacgggcaggcctctgtgccttcgcacatgcagctcccctgccagcctgcaaaactca

SEQ ID NO: 701 - DNA, 295 bp, Homo sapiens
tgctgactgcctggcactgccgctccggcctcgggctgcccgtggcgcccgcaggcggcaggaatcctcctccggcgataggtgagttgtccgcgacccttctcttcccagccggcaaagagcgcggagcggcggcgcctgcgcacagcaggagaaagtgcgtgggggcagctgcccccggcagaggctcgggctagcggggcccctgacgcgtccggcgttgaccacggctggtgggcgcggggagggcgaccaagggactacagcgttagggcgtccagccgggaggccgggg

SEQ ID NO: 702 - DNA, 140 bp, Homo sapiens
aaaacaccacctcagctgcctccctcaaaattataaaaacccaggtgctattttagtaccgacccgctccccccgactccagttctaacacctgtcttggtttgggtgataaatgtgtattcaaaccacaaggctgtgag

SEQ ID NO: 703 - DNA, 273 bp, Homo sapiens
gaggaaggaggtgaagaaacgccaccagatcgtatctcctgtaaagacagccttgactcaagcatgcgttagagcacgtgtcagggccgaccgtgctggcggcgacttcaccgcagtcggctcccagggagaaagcctggcgagtgaggcgcgaaaccggaggggtcggcgaggatgcgggcgaaggaccgagcgtggaggcctcatgcctccggggaaaggaaggggtggtggtgtttgcgcagggggagcgagggggagccggacctaatc

SEQ ID NO: 704 - DNA, 156 bp, Homo sapiens
gcaggtgccaagtgggatgaactggataaggactgcattcggggaaacgcccgtgtgaaaggaaatacacaggaaggaggtggcaacgggtgggaagccactagaccacgacgcgattctgccccagtgaaggcgaggggatagcctgggcctaga

SEQ ID NO: 705 - DNA, 162 bp, Homo sapiens
gcgtcctagcgagtgcagctgccgctccttaccggacccacgagtgaggagccccgaggtcatcaccgagcatgaacgcgggaacgtctgggaaggaaatctgaggccctgctctgacggtcataacaaaggccttcgagccaaccggcgtgttcaaattca

SEQ ID NO: 706 - DNA, 137 bp, Homo sapiens
acgcccaggccgaagcccctcctcgcacgggccccgatctccgggccagcgaggaagggaaagtgctctcctggggacgagttcccaagacgccccaccgcccgcagccccggcccagggtaccttccgctccgccg

SEQ ID NO: 707 - DNA, 151 bp, Homo sapiens
cgcgggctggaggataaggcggtccggcggagcgggcctgacgcgttccggatgccggccatcccgttatcctcggctgcgcccatcccccgtctctggccgcagtccccgcggttacctctgcagcggcgtcgctcatcctgcggtgtgc

SEQ ID NO: 708 - DNA, 149 bp, Homo sapiens
tgggaggccgcgggaaacttcaccgaaggctctgcggactgctctaggactcgtccgccctggagaagacaaagccacgctttctggagacccctgggaggactgtaggatggaactgaacacacaggcacacacgcatgcccattttt

SEQ ID NO: 709 - DNA, 175 bp, Homo sapiens
tgtctcatgagatccgaacaagcagaatgcgaagtaatgcttcaaaacctctttttatctttaaaagtggtttctttgtcttcttcagtaacagcagcgttttttgtcggcatgatgaagagccggctgccgagcttcctcttcctggcaagcaggcgagtggtggccacatgaa

SEQ ID NO: 710 - DNA, 153 bp, Homo sapiens
aggagaccacgcgctgcccctctggcacgatcgtggatgaaccccctggcaactgaaatgggaaaggcagcgcccccgactctggggactggaccgaagtccacggtagtgacagctgccagaccctgaggagaggacgagaagacccgaggc

SEQ ID NO: 711 - DNA, 151 bp, Homo sapiens
cgactggcccttcccgggcgccggcaggtgtctggcctggccggctcgcgtcccagcgcctggttagagcagcgggagcgagggcccgccactttcggtcgaaagtcacttaggttcgcatcggatgcatcattggatccgggatcccacg

SEQ ID NO: 712 - DNA, 173 bp, Homo sapiens
ctgaaactgctttttaacctgcctgcgcctcaaaataagcaaactggaagctggtatcgatttaagggaatggctgatgtagaaactaaaggtttctgtctgactagttcatgctgtctcacaaataaatgctgggaaaaaagtcggtttatagttgatttatgtatcctttg

SEQ ID NO: 713 - DNA, 152 bp, Homo sapiens
attcctctgctgcagtccccgcagctgtgaagcggaaagagggaggaagcagcaggagcctaggggcaccggcacagtgtcactcagcaaagtgcgctgcgtccacacgccctcccgggcctgtgcatagaacctcacgcacacactcacag

SEQ ID NO: 714 - DNA, 152 bp, Homo sapiens
ccgcggcagagagcccctcgttaacccccttcctgtggctgcaccacgtcatggaacattcccggaacgggccaacgttccacccacttcagggaacagacataaaggcgcagacccagttccccacagtgcacagcccaaacacacatgtc

SEQ ID NO: 715 - DNA, 146 bp, Homo sapiens
gccgtgacccgctgtggcactgggccacgagtggaggctgcgcccctccaggtacgagaggggcttccaggtagctccgcgcggcctggggccgaggggaaggagatgagggatgggctcgtgcccgcgcagggtgggagcccaaa

SEQ ID NO: 716 - DNA, 173 bp, Homo sapiens
gagacactgtggcctgtagaaggcccattcggtgactggcgagccgcccacccacccaggccctgcacaccctcagtgcaggtggaagcgagagctgggcttcctggcgtggggcctccgcccttcctgtcctcccttgcctgggctgcgcttgccgactctcctcccagtga

SEQ ID NO: 717 - DNA, 137 bp, Homo sapiens
ttcacaccaaatgcagatgaataacactgggatttttgccttttactggtgagcaaatccgagctggctttccctttaacttgctcctcttttttcgtacctggttttcctgaattgaccaagttgcagctattttt

SEQ ID NO: 718 - DNA, 355 bp, Homo sapiens; identical to SEQ ID NO: 40

SEQ ID NO: 719 - DNA, 139 bp, Homo sapiens
tccccggcgcttctgctttctgggaagccccaacaagaccccggggaccggtcgtccggggaagcctcgcggcaccggcggctcccttcacgggggccgccagtatctgggccccgagtgcagaccccacccggccggc

SEQ ID NO: 720 - DNA, 148 bp, Homo sapiens
ggaggaggcgagggcagcggaggcgcgtcccggctccggcggcgcagcccggcgacggcaggggagggtgggacgaccgagaacacctcctcgttactgggagtactcgagccgactgcagtgtttaaatttttaatagagctaaatt

SEQ ID NO: 721 - DNA, 140 bp, Homo sapiens; identical to SEQ ID NO: 521

SEQ ID NO: 722 - DNA, 252 bp, Homo sapiens
aatgaatatagtaatggggccactagtcgagggtggtaggagcggcggagactcggtaatatactggccacgcctactctgccctgccagtctcttctcacgtgtgcccctggaaggctctgccttaacgcatgcgtagttaccttagttttcgtcgcctctgaggggcgccccgcggctttggatttgaccccgtcaggctaccgtcgcggtgaccggaacggcactaaaggtttgcttccgggcgtttct

SEQ ID NO: 723 - DNA, 187 bp, Homo sapiens
tgccgctctgagtcagtggccccttcgttccttgtaaataaatcccgcccccggaaatgacgtctccaccttcgtgggtcgcgccggataaggtgggctttgggcggggtgctgctgcagcggcgcttcctggtggtcagggcgccatggcgctgtcctggctgcagcgcgtcgagcttgcgctctt

SEQ ID NO: 724 - DNA, 147 bp, Homo sapiens
gctgaagcgctggccacactcggggcaggcaaagggtttctcgcccgtgtgtacgcggagatgctgcgtgagcgtaggccgctggcggaaggccttgccacactcggcgcaggcgaagggccgctccccggtgtggatgcgccggtg

SEQ ID NO: 725 - DNA, 280 bp, Homo sapiens
ggacactcggccgtaaggcggatcccggatcccctcccactccgacccttccctccagaagggccggttcccaaacggcccctttagacacatccaagcggttgccgacggccctcacgatgaaaactgctgtccgttggtgaaggcagcctcttctgtgctcctcgccgctgacttcctgaggcggacctacctgtggaggcataccaggaaccagacgatgaccccctccaaaagttgggtctttgaggagagctactaacttgggttcctggtacac

SEQ ID NO: 726 - DNA, 149 bp, Homo sapiens
ctacgacccgccgcggcgcctgcgcggtagcatcgcggagtcggtgctttagtacgccgctggcacctttactctcgccggccgcgcgaacccgtttgagctcggtatcctagtgcacacgccttgcaagcgacggcgccatgagtctg

SEQ ID NO: 727 - DNA, 207 bp, Homo sapiens
cattcggcttatgctgcctcgccccggcggccgtccagcgggaggcggagcgagtccaaaatggcggctctcaggctggcgcgctccgtgctgctggggctttgaggtggtcgccgggggtccgggggaccctttccccgccgcggaagccctagaggatgaatcggggaccctgctaaggtctggcggcggggctggagagcagtg

SEQ ID NO: 728 - DNA, 145 bp, Homo sapiens
ccgattggacgactggtcccagcgctttccttaggctgtccgtctactggttccagattcgttccatccgtttaaccgcccgatcccgcattccccattggagtcaaaccgctgcctcctggagaagcccaacctaccgcgcgct

SEQ ID NO: 729 - DNA, 141 bp, Homo sapiens
agcagcgccaaagcctgggctgccatcttgccccccgacgcaggggctggcccagcggcccagttcccggggcgctttcctgaacctcgcgagatctgatcacagcctccttgtccctgagatggctatggggctgccaag

SEQ ID NO: 730 - DNA, 134 bp, Homo sapiens
ggggttccctcggtgcgagcgcgcgcggcacttcctgcttttgctcctccctgcggtcctgccggccgttgtaaactggcgctgcgggccacacccgtgttccaggcccgctaacccaccggcggccccagagc

SEQ ID NO: 731 - DNA, 141 bp, Homo sapiens; identical to SEQ ID NO: 200

SEQ ID NO: 732 - DNA, 202 bp, Homo sapiens
cctgggagaacacggcctggagctgggcacgcggggttgcgccggtgacgctccaccgagtctcggacgcgctcctcgcgcccgccgcgccctcggaagcttgcccccgagcaccacagctagcagggttcgcggacggccacccgcactgccctggccccagaggtgcagggttcaaaccccttctctgcagctttctagc

SEQ ID NO: 733 - DNA, 124 bp, Homo sapiens
gatgacgggtggtagccgtagctcgccggcgatccggtgagcgcgccccggacccaccccgcccccacagccccgacttcgacgcacgcgcagctccgtctcagctcgctagccgacccgcccc

SEQ ID NO: 734 - DNA, 149 bp, Homo sapiens
aaactcgtctttggcgaggacggggcgccggcgccgccgcccccgggctcgcggcctgcaggtgggtgccgggccaggcgggaccgtggagcgaccccgcttctcgctcgcaggatctctcgctccctccctgttcccttggatgaccg

SEQ ID NO: 735 - DNA, 1157 bp, Homo sapiens
tcaaccctcttttctagagccccagtgcgcgccaccctagcgagcgcagtaagctcataccccgagcatgcaggctctacgttcctttccctgccgctccgggggctcctgctctccagcgcccaggactgtctctatctcagcctgtgctcccttctctctttgctgcgcccaagggcaccgcttccgccactctccggggggtccccaggcgattcctgatgccccctccttgatcccgtttccgcgctttggcacggcacgctctgtccaggcaacagtttcctctcgcttcttcctacacccaacttcctctccttgcctccctccggcgccccctttttaacgcgcccgaggctggctcacacccactacctctttaggcctttcttaggctccccgtgtgcccccctcaccagcaaagtgggtgcgcctctcttactctttctacccagcgcgtcgtagttcctccccgtttgctgcgcactggccctaacctctcttctcttggtgtcccccagagctcccaggcgcccctccaccgctctgtcctgcgcccggggctctcccgggaatgaactaggggattccacgcaacgtgcggctccgcccgccctctgcgctcagacctcccgagctgcccgcctctctaggagtggccgctggggcctctagtccgcccttccggagctcagctccctagccctcttcaaccctggtaggaacacccgagcgaaccccaccaggagggcgacgagcgcctgctaggccctcgccttattgactgcagcagctggcccgggggtggcggcggggtgaggttcgtaccggcactgtcccgggacaacccttgcagttgcgctccctcccccaccggctcacctcgcctgcagctgggccacggaactccccggccacagacgcagagccctgattcagcgctgtgaaaatcgctagccacccgtcccccatcaagtccgcccacacttgcccacgggtggtggcaccatattcgattcgtgggcacctgcaaggctccatttgcacccgtaacttgccctttcccaaacccggtttgtggacagcgtctgcaccgatatgaaagcgtgcagccgctgaagttcagacaagtctgtattcaaatcccaattctccca

SEQ ID NO: 736 - DNA, 139 bp, Homo sapiens
atcttggtgcttttcagacagtgctcagcgtttgagagaggaaggcagaggttttgtcttatgagttaaaagtatgtgtgcttaacatgaatagctagaaaacccgatcagaggtagtgagatgcctgccctcctgccc

SEQ ID NO: 737 - DNA, 149 bp, Homo sapiens
acagactccagtggaaggctgtggggcgggactcagggttcccggagaggccgccccagctcctgccgcagcgctgggcgccctaccacgcctgctccctagggaccccgggcgtcccacgcacgcacccaccctccttcccgggcctg

SEQ ID NO: 738 - DNA, 183 bp, Homo sapiens
cccgcgccatgccagcctctggacgcagggaaagccgaggaggtggagctcccgcgccctgcgcccccgcactgggcccggctccgtcgagggaaggccaggaatcttggaagaaaccgaaagaaaactccggcggcgggcgaggaggggcgggaggacgacggcccgaggagccgattcggt

SEQ ID NO: 739 - DNA, 150 bp, Homo sapiens
gccacgcgggttcgggccggggaaggcaggggccggtacgtgacgcggggcatgcacgtggcctgggagtgtgcttttcgggacaggtgcgggggccgccgcgcgcgcaaaggcgcagacgcacgcgtgcgggcaccgggcaccgtcggc

SEQ ID NO: 740 - DNA, 285 bp, Homo sapiens
atagcagccgggaacaccgacgagaagaaagccgaggggaagcggaagtgccggatctgtttgggtcacgtgggggcggatgtcgacgggtgccgctgagaaccataaaacttctggccctgctgccaggactttccgtgggtgggaacagggaggcaacccaccaagccaaggcgccaggctgctgtggggaagaaagctggtgcggctctgaaacccgtgggcggaatgaagccagttcccggaacttcatcctgcctcaccctccttagaaattagaaggaa

SEQ ID NO: 741 - DNA, 367 bp, Homo sapiens
ctcccggctccacgtggaccgacctcgcccggcagcgcggggccacctcaccgcgagctcctcccgcagcccggcccgggtcacctcgactcgccaggcttaactcaataaccacaacaccggaaaaggaagcaaaggtcgaagttcatccgcggccctgaggcctgtgggaaacgtagtccaacaacgaaagagccctgaagctcaagcggagcccgctggccgcaggggccgcaccacgccccagaccctggagtttccgggtgcgcagacccttgccatcagcagaggctgccgctgcgcgtcccctaggcgcggaagaggcggctggtggtccctgacggcaaggtgaagtcgaggcagtaat

SEQ ID NO: 742 - DNA, 208 bp, Homo sapiens
aagctagcgccggaagttaaactgcagaaagttgttccctagaatgactgcctactcccaagaggaagcgtgggcgagcggtgttctgcaaaatgggctctccggcagcggatctgcgcagaagcgttccgtgcgtgcaagtgctgcgaaccacgtgggtcccgggcgcgtttcgggtgctggcggctgcagccggagttcaaaccta

SEQ ID NO: 743 - DNA, 141 bp, Homo sapiens
tgcccgtcctccgcaggtttctttctgggccccatgccccagtgtcttagccctcattcccgagccccgcctgccgcggccgcacctggtccgagtcctcgttctcgctgctgtagcagcaccccatggccggggtcgggc

SEQ ID NO: 744 - DNA, 137 bp, Homo sapiens
gtcacagccttgtagccgggagtcgctgccgagtgggcgctcagttttcgggtcgtcatggctggctacgaatacgtgagcccggagcagctggctggctttgataagtacaaggtaccgcgggccggcggatgccc

SEQ ID NO: 745 - DNA, 313 bp, Homo sapiens
aagaagggtggttgagctcctggcctccggatctgcagccactgatggccggactcggacgcggcaacgctaagtccgcgatcttcagctcctaagctgcgagctcagaacggaaaccacagcaactaccgtccgcgccgcggtatttccccgccttcaatggaggcggagggccgcccgttgcttaaaatgaatccctccgcccatctgagcccgccccccgggagcgcggggcccaatcccgttacaaggaccacggacttccgtttcgttccgcctgtaagtcccgcctggtcccgcctcctcctgaaaa

SEQ ID NO: 746 - DNA, 144 bp, Homo sapiens
acgccagatgattcctccctgaggatgcgccccaggcgttctgccctggctcccagccgcctcccggtgctccggggttcggcctcacacacctgtcgaccgcgtcggcccagctgcggcccaagcctgtgggactccggggag

SEQ ID NO: 747 - DNA, 169 bp, Homo sapiens
agcgaccggcagagccgcggccgcgcgccggcgagtgggacccgggcgtcgaacccgggcgggctcctcgaccatcactgccgggcgtgtgtcaccctcccggccaagacggccagcacccgctgcccgacggccgctgcccagagcaggcggcagcggggcacggact

SEQ ID NO: 748 - DNA, 142 bp, Homo sapiens; identical to SEQ ID NO: 308

SEQ ID NO: 749 - DNA, 139 bp, Homo sapiens
gaggaccgcgcgctgcacctgcggagccgggtgaatggatgtcgcgaaggcaagggctgcccttacccctcggggccgacctcggagccctcgcccgtggttgcaacgctttcccgggaaaccggagaagccaggccgg

SEQ ID NO: 750 - DNA, 274 bp, Homo sapiens
ccccagttcaacgagctggaggacaagggactcgccccgcgaggcctcggtttggatgggcagtcgcgggctggagagaaggggaggcgctgtgccttccggggaggagcgggtttaagggttcctttttgacctttattcccaggaccgattctggggcgagtgcttggcgccagggcacgggggcgggggccctgactgcctcagccgaaaaatagtctgttgtgaggaattagcacctaggaggtaggaatgaaacgctgggcacagagag

SEQ ID NO: 751 - DNA, 631 bp, Homo sapiens; identical to SEQ ID NO: 291

SEQ ID NO: 752 - DNA, 160 bp, Homo sapiens; identical to SEQ ID NO: 453

SEQ ID NO: 753 - DNA, 175 bp, Homo sapiens
tcacctccctgggagatatctcagatccgacctcgccttcctggagcggaagtgcctccgagtgcccacggttcgtggactccacttcccagaattcctaagcggaagcgtctcagagttctctcactcctggactacagttcccagaatgctccaagggcagcgcttcccacca

SEQ ID NO: 754 - DNA, 150 bp, Homo sapiens
ccgtgggcgggaggaaagaggcaaataccaggcacagttcgaccctcggaaggtaaggccggggtctgcgccggtcacgggtcttccgcactgcaggcggcgagacccgcagctccctgggatcacagactctcccgcctccgctgaccg

SEQ ID NO: 755 - DNA, 179 bp, Homo sapiens
cctcgcccaagggggccggaacggcgtcggcgcgcgggggcttttcggagcagtcgagtggaaaatagactttaacccgctttgtggcggccggggcgccctgagcgctctccaaaccacggctcccggcgctcaggcgggccgctgccaagacccggcctggagtccccgcagagttg

SEQ ID NO: 756 - DNA, 614 bp, Homo sapiens
gcggcagtccgtccacctctgtcccccggcccctttcggcgagcgctcatttggaaaggaaacagtcactgcggatccacttgggacccggagcatgactgtaacgcctcgttggagtgtatcaacttgcattattttctctaggacgtctccaacctgtctcatgttgaatgtcagagtaatgggaagtgccagtgacaagacggcgtattactcctgattaagtgccgtgtcaacctaattagcagagtaattataaggtgctaatgaatgattcaaagttctttgagttacattttactccaaattaccattttaagaaccctatgaatctgcgaggcgggcatcgcttccgtggctaggtctggaatgatgttcgagtggcctttaatgtctccaaaggctgggccgaaatctggagtttagttgcagttctggaggtcactttctgggccacagcttttatctgttgaggacgaagggaggggtgtcagggaggcaaatgacctcctgggacaagctcttgcctttcggtcggaactgcttctgtgtgagccctgggtccggaagcgggtagctgggcgactcatcctgcctgcgttttcctagggaaa

SEQ ID NO: 757 - DNA, 139 bp, Homo sapiens; identical to SEQ ID NO: 556

SEQ ID NO: 758 - DNA, 184 bp, Homo sapiens
agggcatgggatggtggcagcctctcgattttacccatagtggtccatgagccgtgagcactgtcttcctgttttatatcaggaggtatgttttcaatcagcagacctttatggctctgcagttgcccccaagaattgtggcgtctgcgaagctttcctgcgaaggtgatacgttcaacatgta

SEQ ID NO: 759 - DNA, 255 bp, Homo sapiens
cagacgggagcaggacgctgagagaactacatgcaggaggcggggtccagggcgagggatctacgcagcttgcggtggcgaaggcggctttagtggcagcatgaagcgcaccccgactgccgaggaacgagagcgcgaagctaaggtatgtcgggctcccggggcctggagatcttcgtgcgctgtgagcaaggatcagggaaccggaagggcttggtttgatggcgagcggatgcgcggtgttaaactaaggga

SEQ ID NO: 760 - DNA, 136 bp, Homo sapiens
gagagccggcgccgagttccgctaggagccctccacgctgggggatcctggcgcagagacagcgctgggctactggcgaggctcgcttaaaaagcgtccgtaccccagggtccccgtttgtgggtagaaattcagt

SEQ ID NO: 761 - DNA, 210 bp, Homo sapiens
attagctggctggagtaaaacaactcaaacagcagttaaagcaaagggtgcagcagtagccggggaatcgaggaggcgcggggcggaaagggttagttaggagcccagaggctgatctgtgggcgcccggcgagagaggccccgccccgccctggaggccctggcagctccgggctgagagcagttccggtgccaaaacccttccctccc

SEQ ID NO: 762 - DNA, 142 bp, Homo sapiens
ccacggactcacctgggccccgcccaccgacccatgcagccgcaataggcacatgagcccgggcaaatgtggggccgagcggtttgggggatgcaccggagcaacggcagaccccgttcgaggttgcagcaaaccagaaaca

SEQ ID NO: 763 - DNA, 147 bp, Homo sapiens
ccccagagggccctgaagcagccacagtaaagccgcgtccaccagcagcagggaggtccagggtctcaggtcagggagccgcatggctctgtcaacggatacgagatgagaaatcatgggggtggagtcccaatccttgtccctgcc

SEQ ID NO: 764 - DNA, 202 bp, Homo sapiens
gcgcaaatagccaactacccaaggacacaaagtgacctggaggcgttctgcggtggcgctgccgtcaaggccggggccgcctggccagaccctccctcagacgccccccggggccgccctcactcccgcacgtccctctgcagctgtcctcagccggtggggtcggcagtgaccgcgggaaaaccccgcttgctgtgcgacc

SEQ ID NO: 765 - DNA, 141 bp, Homo sapiens
cgctttaatcgggagggctggagcagagggcggccccgccgaggggcgtggtcagtgtgggcggagccttgggggccgagtccgctggtgggcgggacccaaggggagcagccagtagggaagttgggcgagttccagaat

SEQ ID NO: 766 - DNA, 151 bp, Homo sapiens
gctgctggaccgcgaggaacattgcctgaggctcggggagagcttcgagaagcggccgcgggcctccttccacactattcgttgtaagtcagcgctccccacggttcccttcggccgctccagccgccacatatcaaccttgactccttcc

SEQ ID NO: 767 - DNA, 1045 bp, Homo sapiens
ttgtcctttgaaggccggctcctggagaaattaaagggcccctgtgtgacacagccatgtcatacataaacagaactctgaagcctatcaactcctgaggctaagtaagagggaatgtaggggccaaggcagaagagaaaccaaaacctcagagcgctgagcaaagatgccaatcagagaaagagaaattcatttgcgatgttaattaacaagcggctaattaaaacggcactttgagtgctaatcaatcgccttattaagttacagccatcactggaacaaattgaaacctccccgccccgttttctgcctttggtgcaggcggggccgcgttcccagataccgtgagaggccttggggcgcggaggttgggggcagcctcggtcagctttctcagtctctcccaggtctacagaatacgccactggacaagtgcctaagcagcgacttctggtccagacacaccgcccggggagtaagtagttgcgtcgaagaacaactcattcagcagcagttaacaccgacgtttcctcctagaaagagctcccgcaaagcggggggatgtgacctgtgggcccccagcaggggtaggaggcagttcagcccgagagggggcgctctagggcctggatcctgcatccctatttcctggaacacacccaacgcctcattctgaaaaccctgcttaggccctggccctggtgccgctcagcaaccaggaaagagctggacctgccttcaggcagcaagaacaggactgccagcctcctgtggctctgtctcccgaggctccatgagaaggggatgggggtgcaagaagggaagagtgaggtggtgtgctgggcgtcggggacgaggacgcacgccagccaagacgtgcctcccacccagcccacgcgcgcttccccacccccctggccctccaaaatcggtaagagaattaagatttcgaatccctattttgaggagccttccgcatttcctaattgttaaattcctgcttttcaccaaattcccgggggagaaacatttggcaataagaagg

SEQ ID NO: 768 - DNA, 251 bp, Homo sapiens
gcgcgcgtcgggggtcgtccggctgccaggcagggcgagcacgcgccgggaggccttggaggcgtagggggcgggggtacggctcgcctgctcgcaagatggcggacgaggacggggaagggattcatccctcagcccctcacaggaacggaggtggcggcggcggcggggggtctgggctccactgcgccgggaacggcggcgggggaggcggcggcccgcgggtcgtgcgcatcgtcaagtccgagtcc

SEQ ID NO: 769 - DNA, 378 bp, Homo sapiens
atgtgagccactgcacccagccaatgtgttgttttagtaaaccaaaactatgcaaaggacgcatgaggatccaagcgactcatttaggatggcagcttcactgcaaaaggagtctcgattcagacctcaagacatgcttcgtgggtctcactcaggaaggaagtggaggcaagtcagaatgtggtgagaagagagggtttattgaaagttgctccattacagagcagggtgtcgtcagaaagcaagagggggaacaccccagctttaactttttctcatacaggggtctcgtctgtgtaaagactaagctaaactgtgcctaacatgtattattctattgatttaaagaaaactgtctgtcacggggtcttgctctgt

SEQ ID NO: 770 - DNA, 193 bp, Homo sapiens
agcaaactgctttaaaacagtaatcagaccgaaagtagttgaggaagcctatgacaggaagttgttaataatatccttcgaaatttacctgtgaaatacagagcttgactacttttgtaaaagtggaattgaaagtaaacggcctctgtaatgcaaatcgaccagcagcaagaaagccactacctttggagtc

SEQ ID NO: 771 - DNA, 142 bp, Homo sapiens
tggcgggagtcctccggtatttttcggtgtgaggttgcctagccagtgtgcaaggttgtggcttttgcggagtctctcgggacggtcttgttatcgggcattccggcgtgagaacgctgcctctggggcccttcccaccctg

SEQ ID NO: 772 - DNA, 123 bp, Homo sapiens
ggcacgacccacttcctcgggctccttccacccttgcagggagcctgacactgagggctggcggcttttctggcgcgggccagggggaggaggagaaaggagctcccgggatcccctcgcccc

SEQ ID NO: 773 - DNA, 138 bp, Homo sapiens
cttcccgccggctaactcagcgtgcccaagtcccgtgacttagtgccaggacggtgctgtgacccgttatcccctgtcgggttttacctccccccgggagagctcagccctggatcccggcgggcggcggagcctctc

SEQ ID NO: 774 - DNA, 403 bp, Homo sapiens
ttgacccggcattgaccgccaccgccccccaggtccgtagggaccaaagaaggggcgggaggaagactgtcacgtggcgccggagttcacgtgactcgtacacatgacttccagtccccgggcgcctcctggagagcaaggacgcgggggagcagaggtgagctggcaccggaggctggaggggatccccgagcccgggatcggtgcgcggcagaggaggctcgcgggtgggagctggcgctggggccggggcttccctcgcggaggcgccgccagcaactccccgggggctgctgcacggaagcgctgaggagcgagtcaacagcccctctgctgcctcccgtagatgatccgagccgcgccgccgccgctgttcctgctgctgctgctgctgctgctgcta

SEQ ID NO: 775 - DNA, 160 bp, Homo sapiens
gctctcctctttagaaatttctggttgccaaagttccagaaattgcttcctcattcctgagcctttcattttctcgatttctccattatgtaacggggagctggagctttgggccgaatttccaattaaagatgatttttacagtcaatgagccacgtca

SEQ ID NO: 776 - DNA, 100 bp, Homo sapiens
ttagcacctgggccagcagctgctgtgctcgatttctcaccgggccttagctgcctctccacgagcagggtttgggacgggcagctagccatgcctggcc

SEQ ID NO: 777 - DNA, 435 bp, Homo sapiens
gccgccgccaacttcggctccctccctccgtcgcaaagccctcgagcccgcccggccgccacgcttcagcaaaaggtcgtgcgcagcggcccacactgaagactctccatctgctcccacacctgccccagctggccgctgctatgtggcccgagtgcgcaagaagccggggccgcagacgtcagcagcgccccggcttcgagacccttcggcagcagccgtgactgccgccggcgggcgctgacccatccccgtgccagtctgcagccgaccaatccgcgtcctcttgaggcggggccggagccgcgaggccccgcccccaagccgaggcctcataaatgctgcgacgcacgcccagccgcaaacagccggggctccagcgggagaacgataatgcaaagtgctatgttcttggctgttcaacacgactgcaga

SEQ ID NO: 778 - DNA, 171 bp, Homo sapiens
cggaggactcaggtcgtcaatgattccggggctgaagtgggcatcgacgggtgcactttgctgttccagggagccggctcggcaggcggcggcgacgtggaacttgggctagggctagaaccggcgaaaagcaagccggaaaaggcaagggggcgtcggtgcgctgaccac

SEQ ID NO: 779 - DNA, 271 bp, Homo sapiens
caaaccacagaggtgggagagggaggcggctggtaggccaggagttcctgggggagggctcctgccgggcctcagatccacacccaggggcagggacacgggagggaggctgggtgctgtgtgctgcgatttgtgggttctcgccctggcctgcccactggctgactcacaggcagcccccagcccagtttcctagtgagggccccactggtcagtggggccagcagggaggggggtcaccgggctatttataagaaggagaagtccctcg

SEQ ID NO: 780 - DNA, 152 bp, Homo sapiens
gagggagcggagacgcgccccctgttctgggccgtggcggggaagcaagcggacttggcagtctgcccctccccagctcgccctctgcagcgcacctcttcgcaaacccttgagggcgcagggcctcgctctcctccccgctactcctacag

SEQ ID NO: 781 - DNA, 261 bp, Homo sapiens; identical to SEQ ID NO: 88

SEQ ID NO: 782 - DNA, 585 bp, Homo sapiens
gacctggtgagcgtggaaactcccggctgccccgccgagttcctcaacattcgcatcccgcccggagaccccatgttcgaccccgaccagcgcggggacgtggtgctgcccttccagagaagccgctgggaccccgagaccggacggagtcccagcaatccccgggacccggtgaggcggggaaggcggcgggaagggaccgcaccccagccaggtgggacctgggcttcgggcctggcagggcctggaggggagaggcgcccactccccagccgcggacacccgccgggccccggccttccctagctcgccgccgcccatcgacccgggctcacccgccgcgtgccccgcaggccaaccaggtgacgggctggctggacggcagcgccatctatggttcctcgcattcctggagcgacgcgctgcggagcttctccaggggacagctggcgtcggggcccgaccccgcttttccccgagactcgcagaaccccctgctcatgtgggcggcgcccgaccccgccaccgggcagaacgggccccgggggctgtacggtgaggccacaggggcgggacggggccggc

SEQ ID NO: 783 - DNA, 133 bp, Homo sapiens
aatattttgttcttctggtgctaacgactaatggaggcaaatctttctccctttcgtaaagggctaaaactttgcattttaaggaagttccaagagcagggtcggaggggagggtcaaagggcacaggcctcc

SEQ ID NO: 784 - DNA, 139 bp, Homo sapiens
gggtttgggccctgccgcgggggcccacgtgggaagcggccgagagccccgggccaggctctaagggagcgcaggaggatgccgtccccagccggccgtcccgtagactctccgcgcgtacccgcgtcctgggctcggg

SEQ ID NO: 785 - DNA, 146 bp, Homo sapiens
cagagcgcgcttttccgtccgcctgaggagccgaagcagccccggccccgccgccgccgcctgcccgccggacaaagccgagagcccgcgcccacagccatgtcctcgtcagccggcagcggccaccagcccagccagagccgcgc

SEQ ID NO: 786 - DNA, 285 bp, Homo sapiens
agagcaaacctggcctatccacgctgcaagtggttgtggaggggctggcccgcgccccttccgcgcagtctccttccgcgtcacctctgtgaccgctgtgcccagtcgggccccacagaagcggcaagcgacgtcctcaaccgcaatctcggctcctcgggcgccacccagtggcctcggggcggaatcgcgggcgagctcggaggggctcggggtggcggggcgcagcgcggcgcctgtaaaacaaccctttgtcttcagaaggcgcttgtcctgccaaagcaa

SEQ ID NO: 787 - DNA, 149 bp, Homo sapiens
ttcttggtgagtgaacagcggtgacttgcagcaggaactggcggaccagagctccgtagcacccataacctcatcttcctgaaaaagaggcttctattattatcttcatcgtatagatgaggaaacagaggcacagagaggctaagcga

SEQ ID NO: 788 - DNA, 138 bp, Homo sapiens
tccatctgtgtgtcagctgggagcagccactgagtgcctgctgcctggcagctacaaacagaatttatagtttcccgtgcccgtcacgtaaccacagtctggaggggtgctgcttgggagcccacctttggcacttgg

SEQ ID NO: 789 - DNA, 401 bp, Homo sapiens
gcaggactcccccctccccaaccctcggagatgagagggcgaccgcgcgacgctctgggctgctaggtctcgactcggtatccggaagtcctccagcgttcgcctgcaggaagcggaagtaaaagggcggccggcagctgggcaattgctttgcgaggctgggtgttgagtcgagccgcgggaaaggcgcgtgtcggcctctcactggcgcagcctgcactgccgctgccgcctcgccccgccctgccctggcgttgtctctggcactgtggcggactgaccacggcccgggcatgggctgcaagggagacgcgagcggtgcgtgtgccgcgggtgcgctgccggtgacaggtacccaggggtggcgtgaggaggcctcgtggacaaagagagggtttggg

SEQ ID NO: 790 - DNA, 96 bp, Homo sapiens
ggtgctgggcctagacaagaggctgcaggacaccacccgctccccccatgctcaggactgctgacacacgaacccctacaaacgcggccgcccttg

SEQ ID NO: 791 - DNA, 608 bp, Homo sapiens
gctcagagagaagcgaaggagaggcccagcgagtaaaagccgaggcccttgagccgctcctcggcgcgcgccttctgcttgaggtgcaccttgctgtgccgtttcttctcatcgctgcgcgcgaagcggcggccgcacacgtcgcaagcaaaaggcttctcgccggtgtgggtgcgcacgtgcgtggtgaggtggtcgctgcggctgaagttgcggaggcagatgcggcactggaagggtttgtggcccgtgtggatgcgcaggtggcgattgagctcgtcggagcgcgcaaagctccgcacacaactctccaccgggcaagcgaaggccttggcgtgcggccgcgggcagaagcagcgcgtgctgcatttgccgccgcggcgccccttgcgtcgcgccttggcctgggggaaaggggtgggcggcggcggcggcacgggtggtgcagccacgccactgcttccagggatgtccgccaccagaggtttagggaagtccgccgcggcggcgctgcgaaggcccagcggggaaagctgaggctgcgtactggccagaaactctccgccgtcgccgctactccctccctccccactaggaggggtcaggag

SEQ ID NO: 792 - DNA, 140 bp, Homo sapiens
taggaaatgctttggggaagagaaaagtgaaggggccaaagaagagactttctggaattagcctttctcaacctgcacgaatcccaggggaattccaacagatgggtaacttgttccaatgccatttctagcagtgtctg

SEQ ID NO: 793 - DNA, 143 bp, Homo sapiens
aacagccacaacggctcgctctcccagctaaggcgacagcgctgccattttggatcctgttcagccacgggaagccggcgtttgcacacattttcggacgtcatattaaagcgcaccggacgccgagacttctgggagatgaa

SEQ ID NO: 794 - DNA, 135 bp, Homo sapiens
ctcgagccacaagcggcccggggcctccacctcgcccatcctgggtgccggcctggggagcaggtaaacgggcttgagcggcgcacagccccaatttgctgcaggaagtcccgcctcctcccacatccactagaa

SEQ ID NO: 795 - DNA, 134 bp, Homo sapiens
tcccttcactgctagactgtgagctttttaagggcggggccacatcctgctcatttacacccttgcgtcccagcatctagcctggtgacagagcagaacgtggctctccttcagaccaagcttactctcgtctt

SEQ ID NO: 796 - DNA, 148 bp, Homo sapiens; identical to SEQ ID NO: 330

SEQ ID NO: 797 - DNA, 169 bp, Homo sapiens
ctcctctaaatattagaggcaagcctcgaaccggagctccgggatgcatgccaatctccggttgcgcctgcgcgtcgggctcccgtggggtccacgcatttcctacccggcccccgcgaacaggcgtaaagctctttcttcagtgctcgctctagtgcgcgcgcccgga

SEQ ID NO: 798 - DNA, 151 bp, Homo sapiens
ggcctggcagctgcggtagcggctttgagtgagtgcgggagctgcagataccgagacgctgcgactgccgcaggagtcgccgcagccaaactcgccgcgacgccgggagggagcgtaccgggaaggagagggagaggaggcactcgctgag

SEQ ID NO: 799 - DNA, 172 bp, Homo sapiens
cgacaggtttccgaatccacggcacacgctctgaggtaccagaggtagcaaagcaaaataagcgcggggtcccgcacggcagcgcgggtgcagcgcccaaacctcgcgagatttgttggctgggccaagtaccacccaccaaatctcgcgatacctaggcgcctgagaggct

SEQ ID NO: 800 - DNA, 147 bp, Homo sapiens
gccagggagccgcggcctcctacccggccgggacttcgcgcctcctcggagcccttctcctctccgccacgccccgcgaacttagtcggcctcgcctccgggtgcccgaacactgcctcatcccctagttatggcctccgagcttcc

SEQ ID NO: 801 - DNA, 135 bp, Homo sapiens
agccgaattttgcacggtagcctcagagtcccggagccgagtccagagggcgggatgcaggtattgcgaagaggcacacgctccgagaggaaccaccagagcgtgggctttgggcgaggaggggtctcctctggt

SEQ ID NO: 802 - DNA, 147 bp, Homo sapiens
actacagaacccagaaggttttgtctccagccgcagggatgctgagccaatccgcgctgagaaaagggtcgtttccgctttgggaccaatgggtcggggagggacttccggtatcacttcagtggcggtcatttttgcagcgcttgg

SEQ ID NO: 803 - DNA, 283 bp, Homo sapiens
taaaccctctagctagaaagccgattggcctgcgctcgagcgaggctgccttgtgattggttgacaacaaacccgacgccttgagtcgcgtttaagggcgcacaccgcgcgcaggcgcacttgctccctaagaacccggaagtggtggagccaacggccagccagacctgtggcagtcccagccccagggtgctctccgcggtcggccatttatcggtgaagcaacagccccttgacgtcaagcttgacgcattggagataaagtccaaggaggtgaactaac

SEQ ID NO: 804 - DNA, 147 bp, Homo sapiens
agcctcggggctgaaggccaggaccagccaggccgcgcggacctgaggttgaggaaccgggtgcaggcgagcacgatgggccggtcgtggctctggttgcagcagctcagacgagtgcgggacccgcagggctgagagtggctggag

SEQ ID NO: 805 - DNA, 146 bp, Homo sapiens
ccgcagcccagggaagcgcaaggggggctatccttcaggcctgggcaccgacttccagagaccccagatgggccctcgctcctcagcagcactccaggaatgaatggccacctccaggcaagagagctactacctcggagcagcct

SEQ ID NO: 806 - DNA, 181 bp, Homo sapiens
gcggggccgggcgcgcagtgccgcgcggtggcggcagtggggagagcaatggaggccacggccgactgagaggcgggtgcgctgctggtgctgctgccgcggcggctgctgatgcggaggctgccgcgcgcagtgccgccgagtccgccgcccgcccgggaccgccggtcgccggccagcc

SEQ ID NO: 807 - DNA, 140 bp, Homo sapiens
acggagtattgtttccatccaaaccttgcactgaaaggagcctgtcagcaggaagtgacctcgtgagacaactgtggggagagcaaagggccggggagagaaaggcctcattctcactgcaaacaggaaaaggaaagaga

SEQ ID NO: 808 - DNA, 159 bp, Homo sapiens
tctattcctgggcgttagctgaaagcgtgtttgatcgcgtgctttctctctctccttatacaggttccgtttgtcaaatgtgtgcgacccttctgataagtcaccagaggtgatgagggagagagagaaagaaagcaaattacaactgtaaagagtctc

SEQ ID NO: 809 - DNA, 398 bp, Homo sapiens
cttgggcccggaagccagtccctccccctaagaccccgcgcctctgaaggggcttggaaccagtccgccgctgcacatccttcttggcttcctggcgccccctatcgggggtgagcgaagcccccactactaaatggcctctctccactaccccgactatccctgcacataaactccgttttttttttttctgtttctggtctcttttctctatcgaccagggagcacaggagttatgggtggggggtgattttgcatttgtagaagcgtccagatactaggtttttaatagaggaaccccaggagggtggaggtgcttggggatccggtgcctagctcccttgcttaggcccgggtccagggctggcgcggggccgctgcaatctctgggaagcggg

SEQ ID NO: 810 - DNA, 147 bp, Homo sapiens
accgtgttgggagggagctgggttttcattttgtctgcaggtaacctggcctcattagaggctctgttggcaatctcgttcataacatcactgtgtaaacattttatgccgttgatgtttttgattgtttaatcaggcgtttctctg

SEQ ID NO: 811 - DNA, 152 bp, Homo sapiens
agctgccaggacctcgctgttcctcaccctcggaagccgtgcctcttctctgggcccttggtctggcatccccggccagtgcagccccttcaaccgtggggtaggtggcgggcggaggggccagcctggctgcctggcatccccatggttcc

SEQ ID NO: 812 - DNA, 161 bp, Homo sapiens
accccgccgcgccgggcaagaagatggcgggatcagtggccgacagcgatgccgtggtggtgagtgtggcagggcgcgcgcgaggcgcccctccccgccgtcccgcactccgccgccgcctgctccagcagtgctggggtgctgagcagccgcaggcccgg

SEQ ID NO: 813 - DNA, 190 bp, Homo sapiens
ggtcttggttttatccgaagacttagagaagggacgcaagttccttcgcggagccagaaggaatccgtcgagaagcgggacctcaagctcgcggcccaaaagcgcggccccgccacgacgcctgctagctggccccacttcggcgcgcgccgcttacatcatagctcgcctctccccttccctagccaca

SEQ ID NO: 814 - DNA, 392 bp, Homo sapiens; identical to SEQ ID NO: 17

SEQ ID NO: 815 - DNA, 266 bp, Homo sapiens
acctccagggacgcttctagcacttctacatgcccttatccctccaaactccagggggcgatagcccagcgcctgactctctgcagccccacggcgctccttccaatcagcagagagaacacacgtccttgcggaagtgacggcagttccgagtccagtgggggcggtgggagcgatgagggtctgagacggtgggagcggttgtgtgaagatggaggtaggaacctgatagctaagaaggctggcgagagaacgcggccgaccgg

SEQ ID NO: 816 - DNA, 244 bp, Homo sapiens
ccagtccacttccgcagcttcctcccctcagcatggcaggtcggatcacgtgcgggttctgtcacgtgacatcaggtcacgtgaggccggtcacgccccgggcagcttggctggggctaggcttccggggctctgcagtcctcggcgtgtgctggcagcttcggagcccaccgagccgggcggctaggatggtgagggcgccgggcaggagagaggccggcctgggctggggccgccgtccctg

SEQ ID NO: 817 - DNA, 141 bp, Homo sapiens
cgggaggggcgaacgggccagcagctgacattttttgtttgctctagaatgaacggtggaaggcggcaggccgaggcttttccgcccgctgaaagtcagcgagaaaaacagcgcgcggggagcaaaagcacggcgcctacg

SEQ ID NO: 818 - DNA, 146 bp, Homo sapiens
cgggtctggcagaccctcacgcaggagtcccaggggtcccagtggccgtccctcggagccgggcacccgttgtccttcggatcctaggacgtgccacccctcgaacctcaggacccgccgtccctcagaccccgggcactgacacc

SEQ ID NO: 819 - DNA, 212 bp, Homo sapiens
agccctttgatgtgcccaaagtctccagaagggcgatgccaaacccactcaactttgacaaagtgtgaaacgtctgtaaaaaggagttctctgatgtgtgagaggagacggaaccgagaagaaaaggccgtactctgccccccgcgggacccaggtccccgcctgctgcagagcgcactctgcgcacgtcgagccgcgaaaggttcacagaa

SEQ ID NO: 820 - DNA, 148 bp, Homo sapiens
ccggaggcgagggcctggggccacactgcgctagccctggagctggggttccgaccctcactgacggaaaggcgcggagcgaccctgcaaccacggaccggtacggcggcgttaggagcgtcccgtcccggcgcagcgggtcagggcc

SEQ ID NO: 821 - DNA, 142 bp, Homo sapiens
tagccgcctcctcccgtcctccgtcggccgcctccccggaccgaggcaggacctcaccccgcgcgtgttccccgggcgcccctctgcgaaccccaggcccttcccaggtttgcgcgcgggggccatccagaccctgcggaga

SEQ ID NO: 822 - DNA, 283 bp, Homo sapiens; identical to SEQ ID NO: 548

SEQ ID NO: 823 - DNA, 526 bp, Homo sapiens
ggagagcccaggccccgcgggctgcgggaaaggagagggcagcgactgggcgagggaggaaagaccctggccggggcagcccggcgcgggagaggctgcgtgtgcccggctcagtcacccgccctgggagaaggcggcccggttggaaagttgaggcggaaccgaaggcccccgcgtggaggctgcagcccctgcgccggccgggcgggtccggaaggagcccaggccgcacctccaggccggcgccgccgccgcccagcgcccacccgtccccccggcgccactccacatgcaccttctcccggggcgccgacggcctcggctgcccccgcagcgtttccctagcttccctccaaggcccccggccgctctttctcagcattcttcgcagcttcatctccatccgcgccgccttgccgagaccctccaagccgactcctcagccttctactgaatctcctccaggctagctcccaggggcgcctgtccaggcccgggacttacattcccagtcctcatgcagagc

SEQ ID NO: 824 - DNA, 149 bp, Homo sapiens
aaacgcgccgctagggctggagacggccccgcctctctccctgccaatcagtccctcttcgcgcctgcgcacgcaccgccctctcccgaagccccgccccggtcaccgccccgaggctgtcccggacggttgggtccagaggagccttt

SEQ ID NO: 825 - DNA, 254 bp, Homo sapiens
ttcatgcgccgcgccccggaatgctttgcctttagccactagcggagccgcccgcctgagggagccctccgggagtgagcgcacgcaaccgtgcagtcagattcctccgccgaccgcggccctctctcctcgggctttgccttcgctctctagcttttcttctttcactcccgctcgccgactccagcccgctgggctcacgctctgccggacaccaatcccggcggccctgcccgacggagctcaaggctagg

SEQ ID NO: 826 - DNA, 344 bp, Homo sapiens
cccggggcgggtggcgctcggcctttccgctcccttccttcccacaagtcccttcccgcgcgcgccccacggccctgcccgccctcccgcgtcagcgccccaaccgtcaagccagcaattgaaacgtttccaaaacggtctatttatttgctcccaataaatcgatcggcggtgattaaagaatcgatgtggcctgggtgggcgagtcgcttgaggggagggattgggggctttcgcccggcgcctgcagggaggccgagggcgggcgcgggcctgagggaggcgtgtcccgcccgggccacacccgaggacccgacacctgggctggcaggccccggcaggca

SEQ ID NO: 827 - DNA, 152 bp, Homo sapiens
ggtgcccggcccggggtggaggcgaagcgcggcggcgaggtcagagcgcggcggccggcgccgcagccgcacccccggcgtcctaccttcatgtcgctgatgatggtctggaagaggcctccgagcgcgctgcattccttctcaatcacagc

SEQ ID NO: 828 - DNA, 165 bp, Homo sapiens
acagctggggtcacggatgagcacggagatgcctctcacactccgcggcttcaccacccacctggaggggactagaattcgaagtgcccgcgaaagaagcaaggttcatctccgcccggctttaggacccgggggctccggaaaaagtcattgaacttttttttt

SEQ ID NO: 829 - DNA, 255 bp, Homo sapiens
gtggaggagttataaggagaagcgaggtcagatggttgacaggaagtgggtaaagtgtttcattgaggaagagtgtggggttaaagaacacacaataaaaggagacaaaggaagaagtagggccccgtggaaacaagagtcataaagacatagaagtggagtgccaaatgtctatatttcttcacaaagatgacaagatttgaaaatacacgtcagtgacagtggctggcaatcaactaccacgatagaccataa

SEQ ID NO: 830 - DNA, 206 bp, Homo sapiens
ggagtgttagatcccagctagcatctctgtggagcagccacagctcctaagtcactcactggcctggagcgcaccctcgccctctagttgcacgtgggtgcagtggtgaccactgggggtcgtggatacccccagtgcctgcaaatcgaaggactgctggggtattgaccttggggctgtagtgctccctcagatggggcgacgtt

SEQ ID NO: 831 - DNA, 136 bp, Homo sapiens
ggggagagggcaaccctgggagcactgcacccttgtcggtcccctggaaagctagcggtaagatccgggaggctgaatttgaggccgcggtagtccaggcgacttcccctggaaggtgtgacgatgacttgtactg

SEQ ID NO: 832 - DNA, 144 bp, Homo sapiens
ccccggagaagggcccggggccggactccgccggctgccaagccttaagtagttcggccgctcccgcgccaggcccgccgcccccaccgcccgccacaccggcccacagtgcgcccttgagcggctgtggccccggcccaggtc

SEQ ID NO: 833 - DNA, 143 bp, Homo sapiens
gtgtgtgtttcagagtaagcgatggatctaatccctgggaaaagcccatgctcgtctctaccggctgcaaaccagccctgggaggcaggcgcgtgtggtcgggaggcaggggcctagcttctaattttggttgtgctagtaac

SEQ ID NO: 834 - DNA, 203 bp, Homo sapiens
aaagcgccgcgggctgcaaacggcagaggcgcgcggggtggcgacagtggcgcgggcgcagtgagcgcgtccgagaacagaatgggacgaaacggggcgcttagaggcccgggaatctgtgggtcttttaggcggagaggggcgaaggaggttattcgttttggggaaggtcatggaaacagcaaaggctcagaggtggtgcc

SEQ ID NO: 835 - DNA, 157 bp, Homo sapiens
tggaggcttggagcggtgaggtgacgttcatttcggccgcgtgaagttttctttcaaactgggattggtggggaggccgggggaagggagcggggcggcgatcttggcgccctgcgcggagtccgggagccgcgtcccggccgagtcggggagtgtg

SEQ ID NO: 836 - DNA, 157 bp, Homo sapiens
tcatgacgccatcagagggcgccagagcagggaccggacgcgagttggagatgttggactcgctgttggccttgggcggcctggtgctgcttcggggtgagagccagaggcacggtggcggggcggggggtgcggttcgggcctggctgaggggacg

SEQ ID NO: 837 - DNA, 431 bp, Homo sapiens; identical to SEQ ID NO: 199

SEQ ID NO: 838 - DNA, 183 bp, Homo sapiens
gaggtgtgagaattctagatagggccacgacagtgtgagcacatgaaagattaccaggaagaggttgaaacctggctcctgggagagagaggggtgtgaggccttggcaggaagcccagtgcttggctgccctggtttcctggggcccaggcatgcgtggtcacagtccacagcctagggctg

SEQ ID NO: 839 - DNA, 151 bp, Homo sapiens
agcacatccctacacggggctgtcaggcaaggtcaacgcgctagagtgcaagagcctttgctttgcggattgccgcagcgccgggtgtgggcgcaggtggggatagagtgctgggttttgaaagagtgacccgcaaagctgagggtgcaga

SEQ ID NO: 840 - DNA, 154 bp, Homo sapiens
gcgcaccggcaggttacccttctgcaggcgccgcagcatgatgcccgggatggccacgttgatggccgactcgatgtgcgacgactcgtatagctcctgcggccggcagtccatcagcagcagccgctcgttgcccagctccagctgctcgttg

SEQ ID NO: 841 - DNA, 141 bp, Homo sapiens
agagcggctcggcccggcagtagtggtgggacggcactagctgctggggcctgccgccccgggagtggctgcagcagcgccaggaatcgaggatggtaaaatgacccaggggaagaagaagaaacgggccgcgaaccgcag

SEQ ID NO: 842 - DNA, 157 bp, Homo sapiens
cgggcgccccaagagcgaccggctggggaagatccggagtctggagtaagagccgggcagcgggtgaggctgtgtcctcggggccgggcggtcggggagaagagcggggaccctccccaacggcccgcttgtccccgttatcgccctctgggttcgg

SEQ ID NO: 843 - DNA, 165 bp, Homo sapiens
tgtatcttgaacgattccattgtagaaaaaaatactagtcatagctaaaatgtcacacgtctcatttttttcaagcttcgtgtgacacttaaaatgtctatagcgcttactacgtgccaggctcacgtgagattataggaagcggactttggtcatggagaagct

SEQ ID NO: 844 - DNA, 142 bp, Homo sapiens
gaaccacaggcactggccatctgcacaacagctgggaacgggcaaccagatctttgaaaagcccaagaaaccacaggcaaaaatgtactcaccacaatgacattttcagagtttcgatcagagccctctgtcgagaaggagg

SEQ ID NO: 845 - DNA, 242 bp, Homo sapiens
taattttttggttttctctttgtcaaattttcatggaataactacattcaggtgtagtaatagtaacgcaaagctctgaacaccacgagacaattcgttgcttccgaaacgcagccggcagcaggtactcgagatgagtagtgtgagctcccgagcacccgtaggtcggattatctggtaaggcaccggaagtgaccgcctcgcggctgcttcctctcctggagtccagagtcccgttgctc

SEQ ID NO: 846 - DNA, 172 bp, Homo sapiens
cccgcggcgcggggcagcgctcagcttggtggcgggggcggcggcggcggcccgcgggtcatgatctccgccgtgtccagcccgtggctcacgcagctctcgcatttctgcgacgttgcagccttcacggccagcagcctgagcagcctgggggccgcggggggcttcccgg

SEQ ID NO: 847 - DNA, 139 bp, Homo sapiens
cgcccgcgggaaagaggtggccgccgggcgctggggcgagagcatgcgcagtcgcggcactcgagtcacccggctgcgactcgctggccctggcgtctaaagcgtagccttaattacccggaagtgcggtcccagggac

SEQ ID NO: 848 - DNA, 123 bp, Homo sapiens
gattttgttacggcgcccctgggccttcgattaataaggttcggtcaacggacaagtgagcggttccactgctcgtcagtcgatagggggagtcggtagtctgtccgaccgtaccattaggcg

SEQ ID NO: 849 - DNA, 137 bp, Homo sapiens
tgggtagacaccagacccccaggtcctcccaggccaggccttccccggcactgcggcccctccccacccgggccggcctcggcgggcttagcacccccatgacttacccgtccaggccacgagcccctgccctgccc

SEQ ID NO: 850 - DNA, 758 bp, Homo sapiens
agcctagtgagtgaaaacttaaaagtccccgcgaggagctctagttcccgggcggcgcggccccgactttctcgtcggtagcgctctggccttgggcgcccgccgctttggctatggaggtacagtggccgcgtcccggggagcctgggcctccttgcggctccgagcctccgcggcgcccgcgccccgactctccggtcccggctctctccaggcccggctgtctccggtccctcactgacttcgccagccgcaccacccacctctttctcccgcagacgtaaacccgaatacgccccggccttgggcctagggcctcggcctcgcctggctctacaggattcgggggcggggtaggccggcagagctcagctcgcgccgtgggtccacatgtttttatttcgtgaccctgaccgcgtcccggccataacttcctctgcgttacaacggggataataatccccggccggcctgccggatggtggcgggataatatatcccggtgagggaaggaccgagcttggcagagacacttaactgtcccactgtgtggctgttcacagtccgcccagatttaggggtgggatggggggttttcgggccccggcctgctccccctctccagaccccgcagaaaggggttcatgggcaattaggttccgctggactcgccgggctgcgggcgggtgagcgccgccgggcaccgggcgggggcacgtggcgccctctggggaccgtccgccgcactgcctggcgtc

SEQ ID NO: 851 - DNA, 145 bp, Homo sapiens
tcttctctccaaacacatacgcagcagtgttacagctcttttagaatttgtctagtaggctttctggctttttaccggaaagcccctcttatgatgtttgttgccaatgatagattgttttcactgtgcaaaaattatgggtagt

SEQ ID NO: 852 - DNA, 256 bp, Homo sapiens
gcctaagtccaccccctttcgctaaggccgacgggatacgtagttctaaagcggtggaaagtcgcagagctccgcctcttagaaaccacatatcccaggaggcaatgcgcaggggagcacgggtaagagggcaggtgttagaatcgctggaaaggcgggcgccctttgtttcaagaccattggctattggaggggcggtacatgggaggccactggccaatgggaagcacggaagggggcaacgagggtaaagctg

SEQ ID NO: 853 - DNA, 143 bp, Homo sapiens
caggttttccacaaatgactctgaaaagtcagaggctcaccactgtgtctctgacccacgagaaaagtacccgggcgggccacccacagcttcgggatcggggcgcgcagggaagtagccagcaaagcaggtaagtcccgggc

SEQ ID NO: 854 - DNA, 250 bp, Homo sapiens
acgccgcactacagcgccgcggccttccggggcagcgtgcgtcgcgacgcgggaaggggcctggaggcgggactaggagcctcggagtcaaggggcggagcgccctttgctaataagccaatcagaacgtgagacgctccggtggggcggtgcgcgtcgagcgcggggtggagtctgggtgacttggctggcgggatcaagtgcagctgcttcaggctgaggtggcagatagtgagcgctggtggcggag

SEQ ID NO: 855 - DNA, 149 bp, Homo sapiens
ccacagtgggccagctggtctgtactacccagggctggggcaggaacggagtaacccactcactgcaatgtagcaactgaacacagaggaaaacaggtgtaaccacatgagcggctgaaaaatcagagtaactgggacaggaaatagaa

SEQ ID NO: 856 - DNA, 210 bp, Homo sapiens
atccgatgtgaagaggcgaacgacggcgcgtaggaacgacctcggagttccggatcgcgcagagggacaaatttgttccggagatactatcgcacggcgaggcatggacgctttcatgggtggttacgcgacagttgccaggaccgagggcgaaaccggctgcaaggcattgtgggacattggaggacttggaatatgcgctagaaggct

SEQ ID NO: 857 - DNA, 148 bp, Homo sapiens
ggcaagctgggcccagaataatagaattcaaagaaaatgcataaatcgtggttactatcaagagggtttgaaaagcattttaaatctccttggagacgggttcatttgacccgattctcttactcattatgagaatccattgcttcaa

SEQ ID NO: 858 - DNA, 524 bp, Homo sapiens; identical to SEQ ID NO: 161

SEQ ID NO: 859 - DNA, 213 bp, Homo sapiens
ggagagaggctgtagccctgggcaatcccgggggtcgttacaggaaggtaggaaaatgccaccctcagggcactggttgggctaaaggtgacactggcgtctcacgggctatgaagacggaatgcctcttaatgccggaattccaagacggaatgcctcttaatgccggtaggagcagaagtgcttttcctaagggggccgggttttcctagc

SEQ ID NO: 860 - DNA, 160 bp, Homo sapiens
caggagctcaaggtagttggacacttccacatcagaaggcttggacattccggaagtgtagtccaggagggcggtactgttctgtttttcccccaactccagcattctgtgatatgtagtccggagttccgtgtagtcgcgcatagctcagctgcagtaa

SEQ ID NO: 861 - DNA, 45 bp, Homo sapiens
agcccagttccggggaggctgaaggcgggtaagaggtcctgccgc

SEQ ID NO: 862 - DNA, 150 bp, Homo sapiens
cctgcgcggactccacccaaggcaaccgagcgagggggtgggtgggactcacagcctaccaaataacagtcccagaaaccgaaacgaaatcgaggtggaattctgaaaacacggctcaccagaaagaggggtggagaaggagcgcgagag

SEQ ID NO: 863 - DNA, 429 bp, Homo sapiens
gaccatcaggaaggggcagtggcctcgcgagcagcacctggtctgtggttatgtgccaggaagtgtgtttaaatgacccactccagaactagccgaagaggacctgcgggaaactttcacatcatgtctgtcagggatcccttttgttttgacaatgactcagtaattttaggtgatgcgttttaagtactgtatcttttttggtaatagactgattgtggtacttgggtattgacagggttttttcaggctggtaatgttatctttatgcttttcaagagcttcctcccgctgctttctggacattgggctctgaggcttaggagaggaaatgggggaaccccttgaaggctgcggcaaccctccagcagaggtggtgggtgccgtgggcggaggctggcggcagtgaagatccagagaagtagagaa

SEQ ID NO: 864 - DNA, 143 bp, Homo sapiens
gctggatttgtgccagtgtgcagtggcattctgactaaatgttaacgtttgagaggcatgcacaaggcctacggctgacaatgtcttccttgctgttttgcaactcccgacatttatcaccactttgagttaaggtccatatt

SEQ ID NO: 865 - DNA, 168 bp, Homo sapiens
tccgaaagaatacaatcacagctctttctgagagggagtgggcggccctgaaaagggccattggaagaaaactgacgaaaagattaaccgccgaagccgtacagagtgcgtccttgacgcttgagcgcgtaaaccacatccatggcagtgacagtcttgcgcttggcg

SEQ ID NO: 866 - DNA, 125 bp, Homo sapiens
gccgcccatgtgcctgtggagaagagaggttcctgtggggcagacaggtgtggaccaagtagctgcgaaatttcttctgaagaaaacacacaagggggaagcgagtgagctcagtggaggagggg

SEQ ID NO: 867 - DNA, 213 bp, Homo sapiens
gacagaaagagcctagcatctctcggggctctgggttggccacccagtcctcccctggtgacataaaaagaaagagacggaaaaggaagaattctacctgagttcgccgtaaagcgcccgccctctcgcctctacgcttccagttgcggcttattacgtcacagtaattgctgtaccaaggtcagaatcgccacctgaggcctgaatatcagc

SEQ ID NO: 868 - DNA, 179 bp, Homo sapiens
cattattccgggtgccaggttgctctttttccagcagccttcaggggactcctggctgggcggagtctgtagaggcgcgcggagtcctgggagagcgtcagatgtatttcctttcccttttttcgctcgtgtcccgccgggtggcgctcaccacctccccggaacacgcgagtctcctg

SEQ ID NO: 869 - DNA, 181 bp, Homo sapiens
caagcccgcccttgccgcaggctcctccctagtgtcgtcgctacagaggagcagaggatgacgtgaggacagagtcgcgaacatctcctcggagcgcagctgggccagcggttcccacagccctggagcccaacgtgcgcagaagcgcctcttggagctcctctcccacagatctctcgtc

SEQ ID NO: 870 - DNA, 179 bp, Homo sapiens
aaggctcagggttctaagcccaagtcgccccggccaggctggcacagggcagcccggggaaccggaaggaaggctcagggttctaagcctaagtcgccccggccaggctggcacagggcagggctgagcgcgggaagtgctggcgcaggctgccgggagggagagctgtgtgtgtttcc

SEQ ID NO: 871 - DNA, 297 bp, Homo sapiens
ccggaacccaaggctccgccatccaggacaactgctctgccaacgaggtcccgcgagaatcgagagatctcgcgatacaaacccactcgcatctcgcgagcttccactagacccaacatggcggtacagaaaaaaatcagtatttcggaacttaaaaagcacttcactaacggagtagtgaacatttaaaacactgagacagtaggaagtctttccgctttatacgtctcctcctttccccttgtacagaaaagcagaaatcttaaaaacctccgattaccacgattatactacata

SEQ ID NO: 872 - DNA, 131 bp, Homo sapiens
ccgggcggcggcggcgagggcatctcccctgctcaggtcgccggccgagcagtccccgcggccgccttcctgggaaacaaggtcaccgcccagccggtccctccgaggaggcgcggagcccctgagcgcgg

SEQ ID NO: 873 - DNA, 144 bp, Homo sapiens; identical to SEQ ID NO: 336

SEQ ID NO: 874 - DNA, 137 bp, Homo sapiens
gacgactgtctccccgcgtaccgccacctcttctgcccggacctgctgcggtgagcggggcctgggaagcgagcgcagccttggtgcggggtccggtccgcgggcgccggcgcccccacgtggtccccgagggctcg

SEQ ID NO: 875 - DNA, 157 bp, Homo sapiens
ccaagcgcgtcttgtacgtgggtgagcaggaggggttgctaggcggagtctgagtgaacgcgacccccaagggtcggggcgtggggtgggacgcatctctgaaccaggaggacggcgagctgctgtcaaggccgggtctctggcggtagtgctggcg

SEQ ID NO: 876 - DNA, 2236 bp, Homo sapiens
ggataagaaattggctgattttgctgtcgctcagctggatccaaataaaccaaacatcggagctctcatttgagggggaatgtggttttatggagttgtcaaagctgaaatgatcttctgggaaaagagaaggggctcaccatggggcgataagagggcagtagccagggttcgggccagaatccgagactgctgcggccgcgggggaacgcagccaggaagggtctatgtggccaatgcggtccccattccgatctccaaaatcccccgcgcccgtgcgcgtggacttaccaccatgaagagttgacctcgggggtgagccaggtcaagagcagagggagccagagccagattccaccgagaggggcgttcatattaacccccttgcgtctgcatcaggtcagactccgtgtgcgggcgccatgcgtgcccagagcagaagcgctcagctccgggagcgcctcgtcacggccgccggcgcctcgccgcgcccccgccccccgctcgcgtctgcgacgagtggcgagactcgctgataaagtttcaaacgatgggcccagcgagcgataaaggccagcccggaccgcctcgcccacagcccaattccccaggcgcagcgagcgcctgcagcccgaaagctctgcgcgcctcccgcgcgccccgtccgctctgctcccctccgggcgcagccgagggagggggtgctgcgcctggcgggggtggggagaaacgcggggttttagacacgggtgcatgaaatgatggcaagagatgtctggggatgaggtgaggcggggaagggggaacatcgctgcatggttacgagcacacgcgaatacaggaacctttagggaagctccaggccaaagagcatccgtgggctctcggagcgtgcgttccggattgccgaggccatccgctggcaaacaagtccctgagcgtgcaatgtgaggaaacgaggaagggggccaggggataaggagattactatgcatgggatacaagaatccagagatgattctcaactcattgcttcgcttctctccctgaagctgggatgaagagctagcacttgtaaatttggagctgccgcgtctatgcagggcaaggttagggaggggccaggcctctgcgaaatgacctgttggctttgattccttggtgctgggcttaaatacagagcccatagggaggggaacttggagggtccatgaccctcgggacctaacccagcagtatctgccaaagcacccaggaaagatgcagtttttacgcacacccagctcctctccggagctgcggagcgcaaaagatcacatagagaggaaccgaggcagccaggcgttcgccgggggtgtgcgcccttgcacctcctgccgcctgggcgctcagcctgtgcgccttgtggaggttaagggaccctcggtcctggacctgggcccccgcccagccaagagagaggggcttgggcccgcgggtggagcattttgagcagtagctggcttgtagccgcgccgtttatcaccggaaaggaaggaagaccaggaactcgtggcggccgtgaactgttccattgctcttttcctggggcggagggactcactgcccgcccgaggagcgtgctctggggaatagagtatgcgcctgtgtgtatgtgtgggaggcgaattgttcgcagggcgtgggggagggggtgccgcccagatcggaaggacgggctctccctctctccagcccaccctcgggcctggactggccagagcgtcagccctcgccggcagcgagcgcggtgagaggctggacgaggcgaagctcagagacgccaaaaacctgaaagatgctgtcatcgccacccccttcccccacgctggtccctggcaggtccggcccctcccaggctgacccagatacatccccgtttgggtccggaaagggaggggagggaaacaagcaccgcgccacccacgactcgggaagagcagggctcctcgccagggccgctccgtatcgctgggccgcgacccagggaagttctgcttggtctgcgtcggtcgggcgggaggtgcagggagggcgcgtggggcggcaggcagcggggcgggggagcgtttctgctcgccgtgtgtgcacgccggccatggggagggtatgataggcaccaaagagcaacacgcctctcatgtacttacatgcttatgctcacaaacctccttcccccgtgaagcaggggaataaa

SEQ ID NO: 877 - DNA, 134 bp, Homo sapiens; identical to SEQ ID NO: 544

SEQ ID NO: 878 - DNA, 589 bp, Homo sapiens
cgacctggccgcggagcctgcatttcctcgcagcctctcagtgccctccagccccgcgaccatgtggccacaatccacgcttctccggatcgcggtgcgccggaaccacggaggatgatgccagttacttgctttaccttttcagggctggctcctgatccactttgggggaggagaacatgagtagataatttcagggtgcagcccaatctgccagacttaaaaaaaccatcttgtgtctttggaggtgctgcttaataccaaacatgcggtgccatgaagggaccctttgggggttgaataggagttaacccctgcgctctctttgcaactgtctctcttctcagagtggtgggggaaggctgtacgacacgggtggggaaaggaggtgggggcggggagtattgaatggtggtggaagggtagagaggcgcggagtgaaccccacgccctgtctaaagtgtattttcagagccggcccgcctctcctcggttcaaggtcactgtttcctgggcacgcactgggttgcgggacagagtagccaggttctgccggtgctcggagaagagcgcagtgttttgcaagtgc

SEQ ID NO: 879 - DNA, 155 bp, Homo sapiens
gggtccttccgtgcgcgttgatatgattggccggcgaatcgtggttctcttttcctccttggctgtctgaagatagatcgccatcatggtgagtctccctgggcccgtgcagtcatctgccgcgtatccgagccatccgtggtccctgggtccca

SEQ ID NO: 880 - DNA, 136 bp, Homo sapiens
ggacctctgcctcttctctgagctcgttcttaggcccctctgccgtctgcacgctcctttccagccacccggcctcccgatgccggcctagcacgttcctcgcgccaggcttttgcatctgcccttcccactgtct

SEQ ID NO: 881 - DNA, 145 bp, Homo sapiens
agaccatgccttggacaaaatgtactagaaggggaaatgactggtagagagaggaagcccgtgcatgaccttgctttagccagcgaggcagatatatgcaaaaagggtgcagctgtaccaggtacaaaaacagaactgggtcagc

SEQ ID NO: 882 - DNA, 130 bp, Homo sapiens
tcctgcggcaggtacggtgaccctcctccagttttccagctctaatttaaaacgctgccacacagcgagcgacgctgccagctgcttcgcctacactaacccttgcgcctcacgaccagctgcattagaa

SEQ ID NO: 883 - DNA, 183 bp, Homo sapiens
acaggtgtgagccaccacgcccagccctgactgtgatactttttagctgtgtgaccttgaggaagtggtttctccccctaggtttgtttcctcctctgtaaaataggtcctaaccacattcctctctcatgtagcatcatctctcaagtcgactaaggctggcaccaaggggaaccactctgt

SEQ ID NO: 884 - DNA, 173 bp, Homo sapiens
tattcgctgtggcttcaacatcaacgttcggggtgagaggcttgtacgcaggggtcctggcggagggcgcagggtcggaagcttggggaactcaagatcggttgggttgaggaggggatcctagagcaggacatcaggcggttgtacatttggtctagcgatgaaaactgagg

SEQ ID NO: 885 - DNA, 217 bp, Homo sapiens
ccagtcccgggcgcagggaggagagctggtcagccaagattccaagacaggtgtccacctcctccaacgaagcggaacacgtgacaccaccctatccacttccggcttggagggcatgccctcccgtcaccagcatgcactttcgacaaaaccgtggaatctagtattttcctctgacacctttatattttcttcacttccctataattctgaccta

SEQ ID NO: 886 - DNA, 256 bp, Homo sapiens
gggaagcggtcgatgcccgcggccgacggagactacaacccagaggcggaggacaaagcggaaggccgaagagcgaggacgaaaccggcggaaccgcactttggagcctaacgagccatcgctgcgtctgagactgggacccggaagtaaacaggccggacgtgacgcaagccgctcggcctagggatggtggctggccgggttgtcatggaaaccgctcaggagcagggagctgggagctatgagtgctgactgc

SEQ ID NO: 887 - DNA, 280 bp, Homo sapiens
tgagccaccgcgcccggccccggacccttctttattggcctcaaaacgggtcattttgggaagcggcgcggggctggccgcgcttccctgggccccggccctccccatggtgtttacggggaggcgaacggggagcccagaggctgcgagcctggcctggacccaggagccaggggtatcccacaagtcctggaggctctgaacgcggcgctgacgccgaatacctgtgaaaaagactcggggaggagacccgcagaccgccgagcttctgccgcgggaa

SEQ ID NO: 888 - DNA, 184 bp, Homo sapiens
gcggcggcgggggctacggcggcgcgctgaggacaaactgttagcctcgcgtcccgccttgtctctggtcaggtgacgtgcagctgccatcctgtaagtaggaatggaggcgagggaggagcaaccgaccgtgatcttgttcgagtcaggcccaggagggcacttaatcacctcaaaataggaa

SEQ ID NO: 889 - DNA, 146 bp, Homo sapiens
ggtggctgcatcctgaacggcgcctcccggaacccggccggttagtggcggcttcgaggccatagtgagacatgagccggagtagccatagtaagtgagggcagcctggcagcggcattaatcggggagtggatagcttcacttcg

SEQ ID NO: 890 - DNA, 178 bp, Homo sapiens
atcacccgactgaattctgggatttgtggtttttacgtggcaacattacaccacggtggctacggcaatgcaggccacgcgtctgatcccaaacgacacctccctgttataaattcttatgttggttccgcaagctaactccttaactgtcgttactcccaggcttcctccttctcaa

SEQ ID NO: 891 - DNA, 162 bp, Homo sapiens
cccgcggggcgggagtagggagccgcgcgggcatggggagggcgaggtcgcagaggcctgcgccctgtaactctttccggccccttgcagctcctcccttctcccagagagatctttcgcgaggagggtctcttggggatagcatggtccgggactgggagg

SEQ ID NO: 892 - DNA, 186 bp, Homo sapiens
gaaatcaaagtggtgggctgctgagccgcggctgtggtgtatctctctctgaagtcaaagcatttttacagacagcattcaaccgtagttaaataaaatccctatgctgtagaaagggaaggcattagtaatttccgttgtctatgagtgaaaacagagacgctgagaggctcaatggcttttctg

SEQ ID NO: 893 - DNA, 147 bp, Homo sapiens
ccagcctcgatgggactcgcgaggggccgcggggactcggcggcgccgggatcgtgggaggagacgggagggtcccgacgcccgccaccggtcacatcctcggccccaaaccccggcctggctcctaaggacctgggtcggccgccc

SEQ ID NO: 894 - DNA, 146 bp, Homo sapiens
cagtatcctgcagacactcccagaggggtcgcactgcatacacagtccctgcaaagtcgccccccgataggggtcacaccgcacacaaagtccccgcacagctccccaagacagggtcacatcgcacacagtcctcgcacggtcac

SEQ ID NO: 895 - DNA, 104 bp, Homo sapiens
tccagcccgaggcccaagccaaggtgagcgccgcggggtctagaaagggcccactggggaggcgtggctggagcggccgggggcatccccgacccgccccccag

SEQ ID NO: 896 - DNA, 190 bp, Homo sapiens; identical to SEQ ID NO: 3

SEQ ID NO: 897 - DNA, 317 bp, Homo sapiens
aggctccgccgcagccccgcacgacgcgccggtcgcccagccgctcagagccgaaatgctccgcaccgcctccgcacgggctctaactctaccggatgtgacgcggcgctccttagccaggctcctcccctcccagaaacgcgcgctttcttggcctcgcccctcctcgctctgcctttcctctccagctgcagcgcgtcccgcacaggaagtgacgtgaccccgcccctcgcagggccccacccccattcacgagcctctatgaggcgggaaagctagcgtgtcgtttggctgctgtagtgggcgccacggagcca

SEQ ID NO: 898 - DNA, 160 bp, Homo sapiens
accagatcgggcagagaaaactcgggaacgggggccagactggcggggtccagcgcggtcagaccgagacgcagatgtccgcaccagcccagctctttctcctcgatctcgaccaggaagacctggcccggggccagcggctcgcggctgaagcacacgc

SEQ ID NO: 899 - DNA, 148 bp, Homo sapiens
cagcactgtggccctgaaaataaaatgttaattacatcaatcttacagccatccatcgctagccatctgatgctgatagaaaggcaggaagcactcgtggcagtttgcatatcagggtcagcagttcctttcttaaccctcctctgtc

SEQ ID NO: 900 - DNA, 138 bp, Homo sapiens
gggctccatccactgacccgcggcccgcgcgcctcccggcaccggctacatcgctgggaggtgaggcgctgggagcgcgtgaggctctccgggagaaaacagcccagcttgcatcccagaggaggcagcagccgcagg

SEQ ID NO: 901 - DNA, 326 bp, Homo sapiens
agcaccagggacttgctagccactgaggacgtacctgagacaaagactgtttggcatccttctataatctagttggggatggaggtagggtggcaaaactgtcccaaaaaatcaggaagtataggatgcatatggttatccatgatacgagcttgtaatccagacatgaaggcctgtaaaagatgtctcagatttggagtgtctaaactgtcacctgaaggttaaggaaaaacaactggatgagggaggtggggcagtgggagagctgaaaagtcaccagatctgttaagctgcggtcagacctaagggaggatgtggctgagaag

SEQ ID NO: 902 - DNA, 148 bp, Homo sapiens
catacacacaccgggcacatatttctttccacccatccccaagatcgcaagcgcaaaacctcgcacagcctcacgtttcccaccagctcagacatgcacgctggcggactttcagcggctcacccgtgtgcacactcacgtgcccccc

SEQ ID NO: 903 - DNA, 454 bp, Homo sapiens
tctcctcgcgtctgcatttttctcctagctctagcggctcaagatagctgaacggtctctggagggccggattgccacggcacctcccgcggccgcgcagtgtggttcagcccggactccgcggggcgagctgcccttcctcccccgacccccgcgcaagtggtgcattggcgcgcggcgccgaggggcggggcccgagccgggcgcgcgcgggcgctgctctataaataccgggccgcaccgcccgctgcttcgttcgctccgcgccgcccgcctgctacgagtagaacgctgtccgcagcttgcgcatttcgcagccgctgccgcctcgccgctgctccttcgtaaggccacttccgcacaccgacaccaacatgaacggacagctcaacggcttccacgaggcgttcatcgaggagggcacattccttttcacctcagagtcggtcgggga

SEQ ID NO: 904 - DNA, 150 bp, Homo sapiens
gctgcaccgcctcggcgtagcgggcatcgcggatgagccggtacactagcgcggtaaactccccgtcggggatctgcgcgccgctcagaccagccataaccaccacggctgttatgcgtgcggttaccacggcaacagggcaaccgggca

SEQ ID NO: 905 - DNA, 1129 bp, Homo sapiens
gactgggaaggacatttggctcccggagccaccccccacctcacctgacgggagaccttccggaaagggcagaaggcaaagggtcctactgatggctggggagggtggagaatatcttgagcttttagagaatctgcttatgagatgggaccactgctccaggaagttttgagagccccaaacccaggcacctttcaggcttctccgaggcagccagacaggacctgcctttccctttcgttttcgggataaggccaacagctcccgaggtccccagcggcagggaatccactgcccagtctctggcccagggtatcctgctaacatctgagtgggtcctgggccccatagggcatgggggagtcccctgggggcacaggtctttgggctggggttgccttagtccgaggatcaggtaggatgagggtcaaaggggttgaaggtccgaggcgcctggaggcctggcagacgctagtgggccagggcctaaggtggggatctccggtggagggagggagcaggtctgaatggtgggagagtgaagttctgcttgtgggtctaagctttggagggctgcagcagaggcggcccgggagccctctgcgcgggtgcccttaggcgcgcaccccttgctcacccgcacgcgcggctcggtgaggttggtccacacggcgatctcctccctcatgctcatgtcggggtagcggttcctctggaacgtggcctctagctcttgcaactgctggcttgtgaagtgcgtacgttgccgccgctgcttcttcttcttggctgggtcgtctgcgccgccgcagcccgtgcctcccgcaccactgtcctcgggccccttgggttccccgccgcgctccttctctgcagtaggcaggacggggagcgggtcacctgggcttacgccccgttgcaccccgtcccggctccaccgaaccgctcgccaccagcgctggcggtcttccctccctccctccctctagggttcctgggaactgtccccactggaaagcgcccgccgggtgctggtcgtcagtaggcacctctagtctggtgtgccgcggagaagagcccaagaatcggagctggagccgcgggcctgcgttcctggctgggcagggcc

SEQ ID NO: 906 - DNA, 144 bp, Homo sapiens
ctgagcgtgggccagggcccaggtggtgaccaaggcccggcgcagtggccccggagcgtggaggggcagctgctgggcggcctcccgggggagggtgacggcttcacccgccaacgctgcctccctcctgggattaggccggag

SEQ ID NO: 907 - DNA, 242 bp, Homo sapiens
ggagagggtgggcgcggcgctggctccgcgcgagacacaaaggagccggagctggcgggcgggtcccttcgcggccagctgtacatcagctctggtccctctcggctggggacctccccagcacaccgatcccacaaactctccacgcgcacaccccctcgcccacagacacaatgaaacacaccgaaactcaagcacgcgcgcgtagcccgggacccgagcgatccccaggggccgcgccg

SEQ ID NO: 908 - DNA, 135 bp, Homo sapiens
ctcccagcccaggccgcagagcgagagcgtttccatctgtgctgcgagcgggaagagcctctctgtgctccccggcacgtccagcgcgcgggcgggaacacgctctcctgtggggggcagctttcccagggacct

SEQ ID NO: 909 - DNA, 147 bp, Homo sapiens
cggggtccccttccccgcggaccggggtggccccgcgacctgcagtcgccagtgggcgggccccagatatcagacgtcttaacagtgccccaaccgcttttatgcagggtgattccacgatgcaggagatctctgagcagcactgtg

SEQ ID NO: 910 - DNA, 143 bp, Homo sapiens
ctcacctgagcggccgccccaccgccaacctccgtcagcctgcgagcgcgtgtggcggcgggggtgggggtgcggggacggagggcgggagtgttccggggctaggatggctgggatttagctacaaaagatgttccagaaaa

SEQ ID NO: 911 - DNA, 258 bp, Homo sapiens
cacatgcgagctcagcagattgtgggtaagcagtttcatgtcgccgcacaaactctcgccaggccggaaccggaaaaaggtcgtcctccgctgcctcacttccggggatgctcctctcgatgctattggatagccaggagaaccggaagtggcgaacttgctggaacttctcgtgtttgtgggagctgaggtaggtaggtgaaagacctgtcgggtcacgcgccgctaccggaagcgtctcagcaggaggttcctacg

SEQ ID NO: 912 - DNA, 144 bp, Homo sapiens
tctgagttcagctacaaatcggacaacagaccacagtgaataaaagaattcttttatggaagcagcgggtgttttcgtcattctctaacctaccagaaggtggtgcaaattcactgctgatacagtaaaggaggacgtggcttt

SEQ ID NO: 913 - DNA, 249 bp, Homo sapiens
cgggccagggcgagcgggtcacgtgcggccgggagaggcgccgcgggccgggagtgtgcaggaatgtagcaacttgcagcgaaaagtttccctgcgctgccggccgggccgcggtgcgggcgggcgcgcagaggaaggaagagccgagaggaggcggggccgcggcggcgcgggcgggcgcttctcctaactttagttttggcgtttgaggcgagtttctgtctcagtcgggcgcagccgccgccaggg

SEQ ID NO: 914 - DNA, 140 bp, Homo sapiens
gcgcgaaacgtgccgaagcgtgggccccgcctcctgacgatttttgccgaaggcaggcgagcgcttcggagcggactcgtttttttccgccagtcttggcggaagcctgagacgcaatagatggagactctccttttcgc

SEQ ID NO: 915 - DNA, 146 bp, Homo sapiens
ttcgtccgactctctccctggccattgcgtagccacctcatccagatggcacgaagcctccgggctcgggtttctgactcgtctcccaggagccggtttctgtttaccgctgaaaggcacgcctgctgccaaatttgaggtgtgag

SEQ ID NO: 916 - DNA, 193 bp, Homo sapiens
tgtgaaaaaaagattctgacgatcaaacgtaaaggcaggaaacgggtggagggaagaggaaatgctgaactacaaggtcatggtcaggaaaccaatttggcaaggtatgtggaaaaccaaggcatatagaatcaaataccacatacagtagtgcgcagcccaaagccagctttgttttcagtagcaggactca

SEQ ID NO: 917 - DNA, 134 bp, Homo sapiens
gggctgcgggcctgccgaggccacggagccagcgagggagacgggcgagaaaggctcttctcccttaggaaagagagaacggcccgaaatgacaggacctccgcctcccgggtgccgactcccagccccacagc

SEQ ID NO: 918 - DNA, 159 bp, Homo sapiens
tcgaggcgacagcgtgaaggcctacgccgggggagggggtggtggcggggggcgtttctgtgggggcgaggaagggagcgggtctccgcaggcggaagtttgctttggaagattttattccagacgctgtcctggtccctggacggttaggaacggttg

SEQ ID NO: 919 - DNA, 244 bp, Homo sapiens
cttttccttgcctgacaataccgccccacacgcgatgacgcctttggaatagaactgcgcagctctttggagacatacggcgcatatagaggctagaaagggaacagagtaccagagggccttcccgcttcgggagccgcaggcttcttctcttcggagagagagtgagtgagtgagtaagcgagtgagtgagtgagtggggagggagtgagtccgtccacgggggcgggccctctccatgctg

SEQ ID NO: 920 - DNA, 157 bp, Homo sapiens
ctttcagcgcgtctctgggaatccctggcacaaaatcaccgccgcgctccagccttctccgccctctatggagaagccggagtaacggcctcagaaccgcagtgccgcatcacaccccacccctcgccgcccgccagcgccgcccgccaatgccggg

SEQ ID NO: 921 - DNA, 141 bp, Homo sapiens
gcacgggccaatggggcgccgactcggcgcaggaacaaggcgggggttcggggccggctgcagactctcaccgcagcggccaggaacgccagccgttcacgcgttcggtcctccttggctgactcaccgccctggccgccg

SEQ ID NO: 922 - DNA, 148 bp, Homo sapiens
tggacctggaggccgtggtggccgatgtcagttacctgatggccatggagaagagcaaggcgaccccggccgaccacgcctgcaagaggaccgtcctgcccgaacccacgtaccacctgccccggcccgcgccggtccccgacgccgc

SEQ ID NO: 923 - DNA, 143 bp, Homo sapiens
tgcacgccgccaccgctgcaacaggaaatgcgcgcccggcctggggtggggtcctttgtgtggtcccgtggggcgtctcgcggaagcccgggggcgcccgggccgtgggggacgactctgcacccgacgccaggagcgggtcc

SEQ ID NO: 924 - DNA, 644 bp, Homo sapiens
cgacagagatagctgtgtggttcttccttacgcgtgggtgcaggtgtgcgcgcttggggtgagcccatggttgtgctcgagtatacgggcgcctgtgcacctccagggcaatggtaaagcctggcagagctctttttggaacaaaatgaaggagctccatatccacggaggccacccgtatgggcctttgccaagtagggcagaagaagcccttgttagccagcttccctttgcaacttcctactcttcctttgggtacagactggtgtctgggctagctaggatcacagctgagagcgaaggtgctctcagtgtccgaagaccacgtgctggtgaacccacaatgagaagcgaaagggtttcaggactctagcagaaaggaagagcaagatttcactcagggtttcttagaagaaagagttaactttgctcactggcttttccaggatggagggagtggggatagggtcggggagagaagcattgggagtcttgtcggagtctcaagcaaaaccaggcgagggctccgggcagatccattcccgcagggccctgtctaacctcctttccagtcgcacctctttcctgctttagaccctgcgtctgtgccggtgaccttagagactaggtctggcttatgaaga

SEQ ID NO: 925 - DNA, 139 bp, Homo sapiens
cgcggtccagcggcacgggcagcccctgcggaaggcgagccgggcggccagggctgcacctctgcagctggcgacggcgctgccacctcacgtgcctagcgcgccctgcagccgtcagcccgccgcctgctggaggaaa

SEQ ID NO: 926 - DNA, 241 bp, Homo sapiens
gcgaggtgtggaggggcagggctgggggtggagccgggtcgccagggcgtcggtagggaagacccccgcccctcgcccccccaccgaacctctacactggctggctggacactaagatggctgccgttgccatgacacccaaccctgtgcagacccttcaggaggaggcggtgtgcgccatctgcctcgattacttcacggaccccgtgtccatcggctgcgggcacaacttctgccgagt

SEQ ID NO: 927 - DNA, 172 bp, Homo sapiens
ttgagtccttccctctcctggcttgtgctggagccaagcaggctatggctaccaatcagcgctcagaaaagacgcatgcgtcttcgaacgaacgcgacgtacggttaactttgacccaaagacaacctcttctctcccgcttctctcgctgtgaagatggcgctctccaggg

SEQ ID NO: 928 - DNA, 868 bp, Homo sapiens; identical to SEQ ID NO: 64

SEQ ID NO: 929 - DNA, 176 bp, Homo sapiens
cacggaggattatatcactgaaggcataagattcagaggtgcccgcggtctagcatcccccagtttgggcggaaagtcgaactgctcacaacggcggtcctcgcgagcgcctagcacagcggctgcaatgcctcgtccgatcctgcgagggccgctaggagcgagtcacggcgcgg

SEQ ID NO: 930 - DNA, 141 bp, Homo sapiens
agcggcagccgtgcggtgagggcggtggcgcccgcgggacctgcggtgagtggggcccgggcaggcggggcagcttggcgtgagtgcccaacttcggccttggggctgggctctttgatccagctgcgggtccgaaggaac

SEQ ID NO: 931 - DNA, 406 bp, Homo sapiens
tggggggagatctttgcgagaaaggctagaaaaaatcggtttgaatttacccgcgggcaggcgcaaagcagcaaatgtcacgttactcacctccctggtggaaggtaagcaagacgtgtggccatttcacgaagtggctgagcttaactgtcggctggaggctgacattttacacatttcatgattaactggaaatcgttgtgattgttgtgctcttatgagctggatgtcaagcggcttcttgagagaggttcaaaggtccttttacttagaggaagccagcagttgtagacagggcaagggaagtatttgagagttcctgtgctctgaaaagtgctcaggtccagcctccaagacaaagcaggggtcactcctgctgtcacgtgcaggacatcctctatgtgaa

SEQ ID NO: 932 - DNA, 141 bp, Homo sapiens
cctctaggaaactcgccagatcaggtgaggcgcgccagtgtgtttaagagacgttgcagaatagtagtccgccgtctctcgagcgcttactagtcgttgcttatgctgtttcctatccctgcagtgcctcccactcccatc

SEQ ID NO: 933 - DNA, 140 bp, Homo sapiens
gggccgggcctggcgctgccactcgcgctggagtttgcgggagtttgttgggtcgactttggcgccgccccggggccgctcgcgcgctgccagggccagggccagggccggagccggcgcaggggcgggcggatggcccg

SEQ ID NO: 934 - DNA, 139 bp, Homo sapiens
tccccttgcaaaggaatgtgataccaagtgtgacccgagtccttcagcagaccatgacaaaacaacaggttttcttgttggagaggtggaaacagcggatgattctggaactgggagaagatggctttaaagaatacac

SEQ ID NO: 935 - DNA, 149 bp, Homo sapiens
cgtcagcacgacgccggcgagggccctccagtccggctagcgttttgctgcggaggtggtggaggtggctgcggaaaccgctgggagcgataggacctctagggagacttggggtccgagttgggccgagccccctgggaggcgggccg

SEQ ID NO: 936 - DNA, 129 bp, Homo sapiens
gagcagaagcagaaaaggtgaggtagcagtgaatagaaagaaaatagacacatagttcaacgagttcaggatcgtatagaggaaattattagaaaaaagcagaagtaagaaatagaatagaggaaggaa

SEQ ID NO: 937 - DNA, 155 bp, Homo sapiens
ggctcccggaggccccgagctcccgggaggcgctccggccaacttcgggccggtggggaccgggcctgggcgcggggctctgaaggtgtggaaggaaagtttgggactccgttattcttccacagcgtccttcctcccgtaatatccagcctctt

SEQ ID NO: 938 - DNA, 132 bp, Homo sapiens
gggtgtgcagtgtgcaaatactgaacaggtctatgaaatggtgtgggtaagagatgtgggtgtgggtaaggggcaacgcaggaggctcacggtcccctccctgcagcagagcaacagagggtaaaagaaggg

SEQ ID NO: 939 - DNA, 352 bp, Homo sapiens
gggtgggccacacgcgacccagcgctaaagggtcacagccaagctgtccgcctcctgccttccctttaaagaagccgcacacaagggagctgcccgggagttcaacttccggccacatagtgagaggatgttttcctactggagctgagccgcgggggcgcgccccccggccgcgccctcctagccacgccctccacgcccggccttccgagagcgagctcggtcggacgcacggaaagggctgggccacgtgggcggctgctgagtggttcgccttcgcctctcagcgcgcagtcaggcggaggcaagctcagagcgcacggacagagcggtagcgcgcgcccgcgcgcgt

SEQ ID NO: 940 - DNA, 504 bp, Homo sapiens
ttttgacgctttaaacgagtttcgatagggaaaggaaagcaggctcagcgtggccagtgacttggtgagagtgtgatactaatagcagcaagatacgaggttttgttcctcgcaatggctgtgcttcattctttttttctgatcccaggcagtttccaaggcaaataaatgcccacaccacgtgaggctgccactggctttcacggaaaatttctcccctttagcttaaagagtatataagtgaatgcggtgttttaagaatcgccagttctccgttcaacttggccacagcccaacacatttggactaccaggtttgtggtttcattcgtttacccgcagtgcccctgacagcgcatactggtaagtgactaaagtaaactcacctgagatgcagagcgaagatccaagctacacgttcggaaaccgagccacatattaagatgctcttttggtttagtttgaggaattttcccccgcttgactgtggttgcctcccagcctc

SEQ ID NO: 941 - DNA, 198 bp, Homo sapiens
cggccgctccgcccgcgccgcggggacccaggcgcccgggcctcctgccccgccggctctgctcacaatggcgctcgccgcctgcagctcgggtgctgacggcctgaaagactgacagactgacagccccgaaacttcgcggggaggagagggatagacgcgcggggagtcgaagccgggaaacggcgcctgcaaggg

SEQ ID NO: 942 - DNA, 146 bp, Homo sapiens
gttccgccgtgcgatcatggtgacgccgtttccacttgaggcctggtctcagaccacgaactacaaggaaaaccacgacgaccactaccccggcctaagcggtcagctttctcctcctcctctgcgcgccggactcacgggcacgg

SEQ ID NO: 943 - DNA, 196 bp, Homo sapiens
gagaaacatgggatagtgcaggaattcacgacacaggggttttactcggcggggggggcggggaggagggcggtcgtgtgtccagcaggctgcaccgtggtggagccatctctctttctaggcgccctgggagggaagcacaggtgctgggtataggacagaagccgccctggagctgggctcttattgtctgtgg

SEQ ID NO: 944 - DNA, 277 bp, Homo sapiens; identical to SEQ ID NO: 223

SEQ ID NO: 945 - DNA, 166 bp, Homo sapiens; identical to SEQ ID NO: 79

SEQ ID NO: 946 - DNA, 139 bp, Homo sapiens
tgcagcaggaaggaggactcttttgccgcggactcaagccggaagccgccttcctagtggagacgcgagtgggggaggagcagtccgaggggaacgtgggttgaacgttgcaactagggtggagatcaagctggaacag

SEQ ID NO: 947 - DNA, 210 bp, Homo sapiens
gagtgtgtgtctgacttgtttatctggacgcaatctttgtcgcacccagttatctcgctcagcgaccggggcgaccacgtttccttaaatcagagccccgtggactccgccggagaactacattacccagcggccttcgcgcccttcgcaggaaggacgtctgcgcactaagatactcagttccaagtttggagcttttagctgccagcc

SEQ ID NO: 948 - DNA, 262 bp, Homo sapiens
aggcaccagttagcagtcattcttctggctcttgagggccaccgcatgcctctttccagcccaccagttccccttatccggaatcttgccagccccccaagcacagcaaacagagaggcacaaaggacgaggatggaacgcgattcacaaacaccacagtcacaactcaccatctcgcttctgcggccgagaccagaaagaccggaagagaaggcacttccgctatatcacgctcagaagcttccgcccagggaagcacttc

SEQ ID NO: 949 - DNA, 148 bp, Homo sapiens
gcgagaaagagctgggacccccccgcaacttcgggatcggctgggtgaggctgggcaggcctgatgctcaggggttcgtgccgggaagttcaggtcctcggacaacctctctccagctctccgccgccggtacccacggcccagtctc

SEQ ID NO: 950 - DNA, 147 bp, Homo sapiens
tagctggagagtgaagagtgtctgtctgctgaaggatgactaagcagagtgtggtttatccgcacaggggaacagccctgagcaaccacgggggagggctttgttgtttgtagaaggagactagaccctgttataggcagatggagg

SEQ ID NO: 951 - DNA, 198 bp, Homo sapiens
gccggctggccggggcgcacgcgggggccgacaggagctgcacggagggccctttgtccgccccccccacccgatctctcactctgcccctcccagcccccacccgtgagaaccggccggcgcgaaacgtcacgcagcctggtgacgtcacagtactcctggccaggtggcctcaacctgaaacaactgtcttcaacc

SEQ ID NO: 952 - DNA, 193 bp, Homo sapiens
agagggcaggaccggccgggtggatttggctgctcgtgcaggagctctgaaggggtccgctggcgggggaccctcggacttacccgagctggcactgcggacccctgcgaggttcatagaagcacggaagggggccaagtgcaatgaggatccaagggatgaataagcgaggaatgtagagaaagtgttcatc

SEQ ID NO: 953 - DNA, 138 bp, Homo sapiens
gtctccaaggacctcggtttgtgcgtgcatatgtgccgggtacccggtggggcgggtgcccagtaagtgctcggactcgcaggggaagcgcccacggggacggattggttgttttttcctgtatgaagcggttggcac

SEQ ID NO: 954 - DNA, 134 bp, Homo sapiens
aagcagtccagggaaaccaatttaaaagcgaacacaacaaaactaacagaccggcaaaatctatctttgaagcgccgcgggaggcacaatttgggaacaggtgaggccatgctgggtgggtgaggcccccctct

SEQ ID NO: 955 - DNA, 152 bp, Homo sapiens
aagctcggttcatgcccgagagggggcagtgggggcggctgttgaggcagccgggcccgggcgggattgctggggcccggcccgcgacgacgccgctgccatagcgatccgggccgggagcagttctgcgcatgctcctgcgtccccaaagg

SEQ ID NO: 956 - DNA, 140 bp, Homo sapiens
taacatgctccaggggccgagtgatctggctgtggggaccgtgtgagccgctctgcggttccgcgtcctcgtgccgccgctccggacggccgggccctgggcattcgggaggatggtgagcgccgagaggagccgggaca

SEQ ID NO: 957 - DNA, 144 bp, Homo sapiens
ctggctgcccgtgacgtcgtgcggagagctttaaagtgcgggccgggccgggcgtccgagggtctggtcgggagtcgggccgcgtctccgcagcagccctccgcggcatgaggcgctgccggcgcccctgccccgcgggacgtg

SEQ ID NO: 958 - DNA, 275 bp, Homo sapiens
gagtggtgaatgtattgaggcgagcccaccgcgcccccagcataaccctggtggtggtggtgatgctggaccatgggagatgagagatttccagagtaaacagcgggagcgcactgggggtacccaccacttacgtctgcttcctgatttaacgcgtaggggctgtaaggcgcactgaagttctgtgagccatagcttggaccacaacttgagtgggagtaggacacccccaggttcccggaagtctggtaggtagccggctgggggtggcgatg

SEQ ID NO: 959 - DNA, 313 bp, Homo sapiens
aggctgtccagaacgccatggcaaccggtctcggaactacatctcccgtcatgttccgctcgggggcggagaaagaggcgaggccccgccccaaggactaccaataaatgggcgaagttggaatcgcccggatgggttccgttttatgcaaattttagccgaagaccacacccttcctcattccaaccataggcccggccaacccctttgggttgtgcttcgcctttttcctttccacattattctctccttgaaaacctccaataattaagtcaattaagtgcatcctatctagtgtctctcacggcaacga

SEQ ID NO: 960 - DNA, 159 bp, Homo sapiens
ctgctcagcgcgctcgcgctctccttcccccggggcggcgggggcgctctagggccgcaggttggaggggtcggactccgggatctgcaggatgcggcacacggcgcggatcggccgcaccagcttctgggccgaggccgtaggttgcgccatgggacg

SEQ ID NO: 961 - DNA, 183 bp, Homo sapiens
ccgcagtactgacacgtgccgcgacgtcccctcccggcagctcgcggggacctgggagcgggtggggtctctggctggcggggagccagggctgcgggaaaccgcacgaggtcgcgttcgcgagtggcggagaagcccagacccccgggcgcacgcggccgcgcccacccaggtcgctgggag

SEQ ID NO: 962 - DNA, 143 bp, Homo sapiens
ggaagcgtttctttagcgtgcattaaaaacgtggtgtattttttggtgttcctgcagcgattgagccgttgccgaacgtggtggagctgtggcaggcagaagaaggggaactcctgctgcccactcaggtgaggacgaccagg

SEQ ID NO: 963 - DNA, 148 bp, Homo sapiens
tgtgtgtgtaagtgtgtgcgtgtgtgtgtgtacctggagccttcgacagccggctgggactctaaaaagatcgcgctggtccaccacttgttaaccctttcttcccgccaactcaaaagtttctgagctgacgtcaagtgtcaaagcc

SEQ ID NO: 964 - DNA, 327 bp, Homo sapiens
cttggcttgggaggcctgggttagcttcgcctggggcctgatattagggtaaagagctaagtcagccctaatctcctccttccccaacccacaaaacactaaacaagaaaactgctggtaaggagggtaagaaaaaggccctgagctcctgcctctgtacccactccctcctccacaagtcagccccttctcccctcacctgagacgcaaccctgtggccacagcagcagcagcagcaggaaggctggggccatggttccatccagctgggcagtgtcaggcctggagatccaaggtgagggcccacccgacacaggatgtgccacc

SEQ ID NO: 965 - DNA, 145 bp, Homo sapiens
tctccggggaggtagtgggcacgtgggtccttaacctctccattgcatcatccccatcccggtgggtacagaagcgcagcaaccccgcggtgctcccggaagacaccgcgtctccaacatttacacggagatgctgctcggctca

SEQ ID NO: 966 - DNA, 147 bp, Homo sapiens
ctgcattttctttgggagccgcttggaggttcattaatatcattagcatttaaccccctccctcttcccatcccctccccgcacatggctgacgtcagaccccgccaggagttgggggaaaagctaagtgggccagggacgccctat

SEQ ID NO: 967 - DNA, 158 bp, Homo sapiens
catcaaagtgataataaactcattcacaatactaacaaacacggggctcccagttatttacgaggcaaattcactgcaaggctgggctgtggaacgggagaatcaagatggtgttgattgataaattgacaggttaatttacaagtggataataggag

SEQ ID NO: 968 - DNA, 152 bp, Homo sapiens
ccggccccccgagccgccaggggccgcgccagcagcccagatgcggtgggcgggagctgggggggcggcggggtcccgcgaagacctgcgacctggcgccctcgccggctgtgtcccggccagcccgctttccaggcgagcctcgctaagga

SEQ ID NO: 969 - DNA, 169 bp, Homo sapiens
tgcatggatagcgtatccttactttctgcggtagggaactatggcattagccccagttgggaattgagcacagagaaggatgacggctgaccgcagggagatttatagctctgtggtttttctctcccatgcggtagcatgtgtgacagcaggaagtgtggggttctgc

SEQ ID NO: 970 - DNA, 149 bp, Homo sapiens
aatcacatgatttcctttatttctctggccttaaaacctcccgagtgggtaatctgactcacaggtctaggaaaagggccattcaggatagtagtattggcgggtattttacaatggagctgcagacatcagcaccagcctcctaagga

SEQ ID NO: 971 - DNA, 326 bp, Homo sapiens
ccccgcaccccggaaccggcgtcgctggcgcatcctgggtggaggcaggccccgagctcggggaaggggttttcccttcctctctgacccagatctgcgcgcggcctagcccgggcctcatttcttatccccgccaagggtttcctctcagtcatttgtttaccagaaacatgaaaactgcctgtctggccgggccgcacttgtggcccccgggaccccacctctggccccacctccctcaagtctgcgccccgtccccagccagacccactcgctgccgggaccctttcactgccccggtggagtgaatagaggatgaggggccc

SEQ ID NO: 972 - DNA, 138 bp, Homo sapiens
gccgcctgccgccgtcatgaggctgcgggtgcggcttctgaagcggacctggccgctggaggtgcccgagacggagccgacgctggggcatttgcgctcgcacctgaggcagtccctgctgtgcacctgggggtacag

SEQ ID NO: 973 - DNA, 277 bp, Homo sapiens
cccaacagctgcgcaacccaccaccgcgcaggcgcgctgcgtgccgccagcgccatgcgaaaccgactttcccgtctcgcgagagtggggccggccgccttcgcagttctcgctccgccccccacttcttgctcgttccctcccatccccccaagccagtagctgtgctgcgcagctccctaagcggttgtcaccgctggagacggttgggagaaccgttgtggcgagcgctacacgaggcaaacgacttctcccttctttgaactggaccccgcga

SEQ ID NO: 974 - DNA, 275 bp, Homo sapiens
gagggtggagcaggttatggtgaactggaaacctagaaacgggcctctccaacttcgaagttcccagagtcgggggcgccgggcgcgggcgcggcgggcaggctggggtggggggcgggcagctatgtcgtcaggaacggggcggccccgctgcggccgcgtctgcctggcccgtcccctccagcccagctcgggctccagctccagcgccggcgcttcagctgcgaccgcgagccctctcaagcaaggtagagaccccgcgagccccccagcgc

SEQ ID NO: 975 - DNA, 150 bp, Homo sapiens
agggcaaggagggcacgggggtccgcgtctaggggacatcccggggacagggtgaggaggcctctgcaggtggccccgcgcatcagcgcctgacagccgggccgcgcctgcgcctgagctcccggccgccgcgaggctgccgagtaccag

SEQ ID NO: 976 - DNA, 286 bp, Homo sapiens
cataggcggtgggtgcctctagagagaggatatgatttggggccctggctctgcggacccctggggcacacatggggggcgtggctatgggcctggcccgggatcagagccctgcagatcctggggcgcacctgcaggaggggtgtcaaagctttagggggcggggcacaagagggggctcccgctctgggaggacacggctggggatcacgctttgtagacccccaggagtagccaggcgaacggggacagagccctgtggatccagggcaaagctagtgggtgg

SEQ ID NO: 977 - DNA, 142 bp, Homo sapiens
gagggagaggatttggagctgacccgcgttgagctgagtgttgctgcactttgcggggctggttgactggtacggatgattcggtagatggcattcttcccttggagtcaggactagagaagcagtggcggattagtgagga

SEQ ID NO: 978 - DNA, 258 bp, Homo sapiens
ctgaggtgcaggggaccgcgtcagggcaagggcttgaatgagagcgagggtctgagcgaaaggaccagggcgcggcgccgaaagacggcaacaagcccatttgcacgggtgtggagagaagctgaacactgtgccacgggcctgggtcactcaccaaactctgaggctgcgctggcggcaaaggcagtagcttcactaatcccaaacaacccccaaactctgtttcagaccctgaaccagccccgttgctacgtgtca

SEQ ID NO: 979 - DNA, 186 bp, Homo sapiens
agaacaaagtttaagttttatttttggaggtgtcttcggaagtagctaagcggattagaatggggctcaggcgcgtggctgatctcgaacggcgctctataccacccccaccgccccctagtaaccccagaggttattgttaattggagctgaactctggatacagagatacccatctctctgctt

SEQ ID NO: 980 - DNA, 138 bp, Homo sapiens
ggccgagaagcgggcagccgagaaggtgtccgaggcccgcaaaagtgagtttcagggtggggctgcccggcgtggcgcgagtcgaagaaagaccgctgggcctcaggtggtgggtagattaggcccgaaaaactgcgg

SEQ ID NO: 981 - DNA, 323 bp, Homo sapiens
actgtggccccaatacctttccctttcgctcctgctccaggctccgcctccgccgtgtccgggccgctcgccccgcccccgctcgccccgcccctggatttgctccctcaaagcggaagtgaggccggactgaggctcttacagtggtccctgctggcccttggtgacgggtcgcctcagttccgacccggacccgtacgctgctgcgctgacgtggctcccggaagtagggctggcgtagggccgccatgttgcagcaggtgaggggctgagggctcgctgggagggtggcggctcctgggactggctctgcaggttccgtg

SEQ ID NO: 982 - DNA, 144 bp, Homo sapiens
cctggcggtttccaggggcggacggcacagtggtttgggcgggacactggcgggtggcacctcggagacatgagttcggcgtctgttgggaggcctaatctgtcccccaggctgcccgcccacagcctagacacgtctcctctg

SEQ ID NO: 983 - DNA, 135 bp, Homo sapiens
gtccgaggagagggtccctcggtgcccagcacagtgcgtggcacagtcggtgctcagggagcgatagctagatgaaaccgtacttttcgggatcctagtccatccaaagcagccgccttcggggcaggtgtgggg

SEQ ID NO: 984 - DNA, 400 bp, Homo sapiens
agccgacccgttccttgaagcgggccagaaacgccggctcggctggccgcacgtacgatacctggttccgcttgctcatggtagctctgggtaaagacagaagacaggttccgcgacggattcgcgacgatacagaggcgcttagctgtgacgtcactgggccacgcccccgatgcgtaggccgggcaacatggcggcctccatgcgggcgtcaacgtccgatccaagcgccaaattcaaatttgcggccatcttgagcgggcggaattcagtcgcgcgcggtgcagtcgggaggtggaggcaccggctgcattgttttcgggatcgaggggtgagggcgctatggcacccggctgcaaaagtaagtctgggcccccggcttcgttaccctatttttgcc

SEQ ID NO: 985 - DNA, 215 bp, Homo sapiens
ccctcgcgcccaggctgccgcggggagggcgccatcttggccccgcggagcgtgactgtctcggctggaagcgtgggaggccggaggatcagtgactggctgtcgtggacatgctcgctacacctcccggggcttcgcttcgtttactattaactgtcgttactcctctgtatctcgtcagcaggggctgcctgcggtgttagaattacacgccc

SEQ ID NO: 986 - DNA, 81 bp, Homo sapiens
actgactaaggggcggggccagggtctcacaccctgcagtggatgcatggctgcgagctggggcccgacgggcgcttcctc

SEQ ID NO: 987 - DNA, 1388 bp, Homo sapiens; identical to SEQ ID NO: 357

SEQ ID NO: 988 - DNA, 182 bp, Homo sapiens
aaccctaccaccacttcccattttccttagaaaaaaaaatccaacaggacctagccccgggctgcctgtcagacctcggcgagcacgccaggctctgcacaccgtctctcggagcagtcccgaagaggccgttcccaccagactccgggacctcctcagggcagctcttcgtcctccacccc

SEQ ID NO: 989 - DNA, 141 bp, Homo sapiens
ctcccctcccccaagccgactctttgtcaccgagcgccggcccgagcccccggcgaaagcccacggcagcactggcaccaccccggcgccggggactcacagaccgggaacgtgtgcgatttctaaaccgcacgacgggag

SEQ ID NO: 990 - DNA, 213 bp, Homo sapiens
gcaactctgaggacaactgcgacccagagcaccacagggtgtcctagagccacctgggcgtagaataatgacgtataaggatgtggaggccaccaattggctgcgctgtgcgaagacggacaggtaggcggggcgggaggaggtgtggtcggcagagcaaatccaatagtcttttccgcggcgggcggccaggcttctgctgggtcctaatgc

SEQ ID NO: 991 - DNA, 350 bp, Homo sapiens
gcggcagaatgtggattgaggcgcggaaggggctccctctccgcagcacccacctgctcgccgcgctgggtgcccagaacgcgctgccaggtcctcgagggcgataccctcagatccctgccgtccttgacacccactcccctgcaaatcatggccccgaacccggggttaagcgagacacttgacacttccccggcgcggctggaggacccaaggctgccacagttcgcgacttcgggacagcccatccctgatctccgggccgtgagcccgaatccccgatgttaccagctcagctgccgatactcccgacgtcacaccccgggacccattcaccctcactcgcagaa

SEQ ID NO: 992 - DNA, 206 bp, Homo sapiens
ccaacggtgcctccccgtggttagtccgtccaatctcggcactccacttccacacttgcgcgacagccctctccccgcaagcccctgccccttttctagacaccagaggcactgacctgtctgtgacaccgcctcagtgtcttacactcagaagccgcattctctggccgggttgtttggtccatttttggttgcctctgagattc

SEQ ID NO: 993 - DNA, 132 bp, Homo sapiens
ttttagaaactgtttcttaatttccataagaaacaaaaaaatcacaggaaggcctggttcctctcccggacgactgcgtccccaggctctccaggaatcttcgccttatccgagcttcttcgcagccctgga

SEQ ID NO: 994 - DNA, 133 bp, Homo sapiens
cccgcggctggggccagacccggcagaaggcggagcagactagggtgtccgtcaccgtcctcggtgtgaaccgccacggatgcacgcgggtgctggctggggggcctccccggttgagggaattgagacccag

SEQ ID NO: 995 - DNA, 270 bp, Homo sapiens
tcctggacagaccctcacgaccagtgatacgtctggtccgacttaagcttcctttccaaatgtacatccaattcgttttttatggcacgatttttgccttgaagaattctcaccccaaaacgctgcccgcccctgtccccggaccctttcggtacccggggcaacggggaacccgggagcgctcgctacctggacagggtgcaccatgcccgatccagcgcagggcagcaggcctgcagccaccgcaaagcacgatcggcgcacggcaga

SEQ ID NO: 996 - DNA, 210 bp, Homo sapiens
ggatttctagtctcttgccactgccaccgctgccagccactgcctttggcaagaaggtaggtgactcaagtgtgaactaggacttggcaagggaacaccaaaccagaaggcctccaggcaggaagctccaaaaaggccacctgctgaaacagtttgtctgcaggcagcctccgagatgaaagtagtgttctgccatcattaacaaatgca

SEQ ID NO: 997 - DNA, 152 bp, Homo sapiens
aagctcccagggcgcgctttgcttggaaaggcacaggtaggaagcgcgggctgccgggtgcacgctcgccgccctgggaggagtctccctcccttggctctcctttctgggaactgccggctgtcccgtagcgttggcggttccagagtgcg

SEQ ID NO: 998 - DNA, 212 bp, Homo sapiens
tacttctcctttcatgatggcggtcagggcgcctggaagaccccactacggttataaaaggggtatgtagacccacaacaacaacaagtttcaggggcctgagagatttcaccaaatgtcaggaagccagaaggatgtggggagagcactgagcgatgaagctgagcagaggcagcttacagcccggagagttctgagcgggtactgccaag

SEQ ID NO: 999 - DNA, 130 bp, Homo sapiens
ctctttgccaccctcagaggcgagctgtggaagccttgactcttagggccgttttagaacccgggcctcggaccggcggggtttctgcacgtggaaccggaacatctgagatgatcgcaggccctgtgga

SEQ ID NO: 1000 - DNA, 149 bp, Homo sapiens
cccgcagtgacgggcccgcccccgcgggcggagacagagttgcaggcctcgttccgggaagtgctgcgctgggcgccgcgggatgccgagctgatcgagccctggaggcccagcctgggcgagctgctggccaggcccgaggctctgac

SEQ ID NO: 1001 - DNA, 131 bp, Homo sapiens
ggaaccacctgtgtagcagacacagcgctgttgcataaggctgtggtcactggcacagttttattggaaggtggagaaattatttttacatcaaagaaacaaaaaaactggccgagcgtggtggctcatgc

SEQ ID NO: 1002 - DNA, 149 bp, Homo sapiens
tgtcagctgatttactgcagtggcggcggcggcggcaccggcaccttgcagtatcactggggagacggcggctgtatagcgcttgccgccccacggattatcccagcaggatctacgcaccccgcatcctccgtagttccgccctatcc

SEQ ID NO: 1003 - DNA, 139 bp, Homo sapiens
ccccgcgcgggactggccaggctcttccattaaccctgtctggtccggccgatcccgccgcgacccgagcgcctctcggccccgcagcacagggcgcccaggacccgccaccctcgccgcccgttcccctctccggaga

SEQ ID NO: 1004 - DNA, 141 bp, Homo sapiens
ttccagtctggtggcccttccggccacccctttaaccccagctttccctcccccttctttcgatcagagatcggcggagaccctcgaagtgcgcaaacttgacactcaccctgaccggtaaggaaagcgagggtgtggggg

SEQ ID NO: 1005 - DNA, 155 bp, Homo sapiens
tgtagacagggctggaagggctgcggtgggtgactgcctttcagtgcccggagcctgagggccgggggaaacgagcacgaaatcttcggaggtctctccgtctgacgttcccctacaaacacggcctcgcccggaccccatccccaccagcacag

SEQ ID NO: 1006 - DNA, 145 bp, Homo sapiens
acggccaggcagcccggggtggcgcgtggccctgcgcagggcagtggaagcagcgggccccagggagcatgagacgccgcgctccgtggggcggtcccagcgctgtgcagcgaggggccagggctgtccccggtcctgcgcggcc

SEQ ID NO: 1007 - DNA, 175 bp, Homo sapiens
taaagaaaaccactaaccagtaacatccggctcagtaggctgagcacaaaagcaaggttttgctttggccctagacctagaagcctgctgagtgagcgccttggccctagaaaagaggagcagggggttgtccggagcccctccgaccacgctgctctcagtcaggcaccacaga

SEQ ID NO: 1008 - DNA, 377 bp, Homo sapiens
caagcaggcggaactcaccacagccagggtggactccaccacgataaaggcgaaatggcactgaccatgcggagccagcgccggaaaagatggcgattgtgcgctgacgtcacttccgctccgagcctcgggccgggcggggctcctgggttcgagtttcagccacataggacccagtcaaacacagaaattgtagtttcttcccgggtgggcgcggacaggcccttacttgggggcggtttagaggtgggacccggctagccggcggttcaggtggccggacctgctggaagggcgggcgtgggggatgggacgcaccccaggggatgctcctgcagagcttttcccaggtgggcacagtggctaaggcctgtaag

SEQ ID NO: 1009 - DNA, 147 bp, Homo sapiens
gagtgaggaggcgctgctgtcagtattaccgacgatccgggtccctaaggctggagaccgggtccacaaagacgagtgcgccttctccttcgacacgccggtaagcccattccccacgcccgcaacgagcacgacttccttccatcg

SEQ ID NO: 1010 - DNA, 137 bp, Homo sapiens
gaggttctgaggttctgaggactcacccccggatgtcttttgatctgccggtagaagcgggccccaagactggctcctgccatatcgttgttttcccagtctggtcctctgcagtggctctgtcctctccctcctcc

SEQ ID NO: 1011 - DNA, 151 bp, Homo sapiens
atatgacgcctctggattcaactgagcgtatagctcccctaaatgcacaatcagaggcaagacgcgggctccagtatcgccgacagcctcaaacccggcaacgcggagcgcgcccggcagactacgctcagaattcagcactgcggacagt

SEQ ID NO: 1012 - DNA, 148 bp, Homo sapiens
taaactctcgcagctaaagcggagcagaatgtagaaagagtatctacttctccggattgttgggaggagggtcgaagcgtagactggccacgcccgggtcccgctctctcgttgcacaactgcaagctagatctgggcatcgaaggag

SEQ ID NO: 1013 - DNA, 147 bp, Homo sapiens
ccccgtggcccccgcgagctccaccccttgttccgcccggtgccttgaggggatccagccccgcgtgggctcccgccctgcgtgggctcccgagtcacgtcgatgctggccccgctgtatcaccttcgaaaccgaatttctaatttg

SEQ ID NO: 1014 - DNA, 156 bp, Homo sapiens
gggatgaggggacggagcgaggacggctcccacgcgttcggaaggctggcctgggacaggaagcgaggcgcggcggcggccgggttcctcacctgtgtccggagtgggtggtggcggcggacggacgggctcagcagtctctgggcggcggcggcg

SEQ ID NO: 1015 - DNA, 136 bp, Homo sapiens
aggcggccaggccggggctccacgcgggcggagtggaggccgggccagggacgcgcacactagaagagccgcggaagaaggcggtccagcccgcgtggttgccatggcgccctagaggcgttactgctgctcccgg

SEQ ID NO: 1016 - DNA, 154 bp, Homo sapiens
gcaccagcacaaagcacatgcggctccttccccacggccacctatccctgccgccaaaaacgagttaatctttcaccgcgaaaacggccttgtgggcagacccactccaactgtggcccctgagaaaccaagtcagccggagagaggcaagtta

SEQ ID NO: 1017 - DNA, 100 bp, Homo sapiens
gaagtcccacaatggtaactgccaggaagtatttgatttaaattagaacatggaaacagaagactgcgataacaatgtcttttaaacgtttttgtttttt

SEQ ID NO: 1018 - DNA, 150 bp, Homo sapiens
ggcgcaggggccgggagcaagtgcacgccgcgcggaggacgaagaggctgcacgcacagccgctgccgggggtcggggccaagtgcgcgcctcgccgaggacgaagaggctggcgtgcccggtggctcggctagctcccgggtcccggcc

SEQ ID NO: 1019 - DNA, 145 bp, Homo sapiens; identical to SEQ ID NO: 350

SEQ ID NO: 1020 - DNA, 114 bp, Homo sapiens
caaatatggagcagttggctgccgccgccgcagctcaaggatccgacttcatgggggtggggggcaccctctggcgggcggcccggcgagccgcacagagcacggcgagcgcac

SEQ ID NO: 1021 - DNA, 150 bp, Homo sapiens
cgctgctaccctaggcggccaccccaaggatgattttagggcttcatccttccatcccttcttccccagttccctcccacgaggctgatttttcctgctgtttcctgccacgtccacacataagtcaaagataaagtctgctgggaagta

SEQ ID NO: 1022 - DNA, 139 bp, Homo sapiens
actgagggtcgccaggagagaggaagacagggcttaagatcgaaagccagagcgtagagaagtgttaagtctccgttctctgcctcagccgggagggaaggatgaagcctgaggctctgggaaacaggaaatcacagcg

SEQ ID NO: 1023 - DNA, 148 bp, Homo sapiens
acttcctctcaccctcgcccccacatcaccccgtcgccaccgggagctgcacgagtgcgacacgcaagggagcgcaggtgtcctcgcggtcccgcatcacatccgcaagccgatttccccagctcgggggctgttatctggcccggat

SEQ ID NO: 1024 - DNA, 148 bp, Homo sapiens
gccggcacgcaatccggtagccacgaccctttccagttcagtgggcggctactcacggtgttcggtgttaaggagacggccggcgggaggctgacgagagccgggaggcgttagcgaaggaagagaaaaaccgaagacgaagccacta

SEQ ID NO: 1025 - DNA, 895 bp, Homo sapiens
aggaaactggctctcatgcccttggacacgcttcctggcctgagcctgacctgttttctctcctctcccactgtttttcagctccagaaaaccaggggctgccagcacccacctttttggcaactgcctttccctggtttctacccacccgggtcagactcttttcgctacccagccgggggagagggacggctttcagacgctttcctccctgtcttcctgtgtttcccatgtttatcaatgtaaacggtctctccgcagaaaatatcgagatggtgtttgtgtctgtaaggacacacagtgaatataatttttctgaacaaggccttctctggtcaaatctggccttcggacgatcaggctggtgggatttcagacacacatcactaggcccaccttcctgccttatctaaacaccctggaaagaaaatcactgactatgtacttttcctaagaataataaagataagagacaaagaaggccccagggattcagagttcaaaatcaaagaatcgagacccgagcctcctgtgccacgagctgtagcttctcgggtggtggccgcagaggccaggatcgcatagctggatgaacattcggttgtgactggaactggggtgaggaagcaggcgtgagagactggagtacccgaggccgggtttgctctccctagcgccgcagcttggcgttctggggcggtccgcggggccagaaggcatggcgcagcccggagttgggtactcaccggaggatggacgatccgaataacgtgtgcagtacacccaggcgggccatacgagaggctgctgcgagtcagttttgaccacgggcccgccgttggctgagcccataagtaggatagccgggttgccgtgctccgggtatttggtgccc

SEQ ID NO: 1026 - DNA, 144 bp, Homo sapiens
tctttgcagcaggtggccgccgcatctcccacccgccaggctgccaaccgaaacgactgcagactatcacatccggcatgaagccccgcccccgtactgctacctgtctccagccccgcgcggtcttctcagccgcccgagcca

SEQ ID NO: 1027 - DNA, 131 bp, Homo sapiens
cagctctgagaggcaacagggggcaagcggaggcagagaaaggggatcaaagcggcgagatcccagacggggcccccgaggagcttctgcagaaaggactctggggctgtccccaccgttcccccgagaga

SEQ ID NO: 1028 - DNA, 320 bp, Homo sapiens
ctctccgttgagccccgcgccttcgcccgggtggggcgctgcgctgtcagcggccttgctgtgtgaggcagaacctgcgggggcaggggcgggctggttccctggccagccattggcagagtccgcaggctagggctgtcaatcatgctggccggcgtggccccgcctccgccggcgcggccccgcctccgccggcgcagcgtctgggacgcaaggcgccgtgggggctgccgggacgggtccaagatggacggccgctcaggttctgcttttacctgcggcccagagccccattcattgccccggtgctgagcggcgcc

SEQ ID NO: 1029 - DNA, 139 bp, Homo sapiens
caattgacccgacccgattggctgggcttgtaccgagctctgattggcttcctattctgattttttttttcctttccccgccctcgttagtttgtccaaccggtgggacataatctgccccattcccccggatgagccc

SEQ ID NO: 1030 - DNA, 235 bp, Homo sapiens
agaggtttggcccaatcaggcatcccacctaaccagacgggccggagtctgtggcccggttggaccaacgaaaactctagggcggatttgccgggatttctgggaaagtgacactcccggaagctaccgcctcttataagccacacatgggcggagttagccttccggcccgcagtcccactggctgacttcgctgcccgtcacgggaatgcgggagagggcggcgccggggcgc

SEQ ID NO: 1031 - DNA, 140 bp, Homo sapiens
ggagacgaataaagccttcttaagcggaaggtggagaaacactggggttggatttggtgggaggaagacaaaacggaaaagcacggcccaagaagcaacggcaaagggagaacttaaacaagattagattgatgccacaa

SEQ ID NO: 1032 - DNA, 162 bp, Homo sapiens
agagagagagagtcttgagagagaaagagagagagagagagtcttgctttcgaacaaagaaaaaggaaataaaaagacccgataatctcaaaaggttatttgctgcttgaaatttgtgattcggtgtattctacccagcaactgctgagaaataaggttcga

SEQ ID NO: 1033 - DNA, 147 bp, Homo sapiens
gctgtcagggaattgtaaatcaaagcaaacaccgatgagaatggcccaaatccaggacactcagcaccaaatgcgagggaggatgtgaagccacaggaagcctcactcactgctggtgggaacgcaaaacagtacagccaccttgga

SEQ ID NO: 1034 - DNA, 108 bp, Homo sapiens
agcagtacagtatgctgccaggtggcgttggccgatcagttcaaaatcaaactccggcgtggcccttatttaaaacgaggattccgggcccggcgctgtggctcacgc

SEQ ID NO: 1035 - DNA, 146 bp, Homo sapiens
attgttagtagacaagctataagaatatatctaagcaagggtattggagataggtgcagagaccctagctgaaacccgttaatttacctataaacaaaggcattgttcctttggaagaggcaatgaagagtaagacgcgatttctg

SEQ ID NO: 1036 - DNA, 142 bp, Homo sapiens
agcaggtccgcgctccaggggcccctctcacctgcttcgtctgcaaccttggagtggcgaggagaagggagctggtgctcgcagggtgccaagcagggagaagaccaccgtcatctcccgcccccagccctcttcgccgagc

SEQ ID NO: 1037 - DNA, 138 bp, Homo sapiens
tcccaaggccggcggcggcatggcggccaggcagatctgggcacggacgggtgccgcgctctgcaggcaaccttccgccgccccgccgccagcacctctctgggtaagagctgggttccgacagcagctcagcttaac

SEQ ID NO: 1038 - DNA, 141 bp, Homo sapiens; identical to SEQ ID NO: 195

SEQ ID NO: 1039 - DNA, 138 bp, Homo sapiens
ctgtggctcagtttctctaagggctgccgcgggttccgcaaagactcactccagaatccccagctccctcgcgtcagcgaatgtcccgctggtccaggcagccttttcctgcgcggttcttcagttcctttttctaaa

SEQ ID NO: 1040 - DNA, 136 bp, Homo sapiens
tctgggagcctactcctttaagagattaggcagtacgcctattctcgcctggtcccagcgtaccttgcgcggctcgccgtcccccactcacgtaccagggctcattgcgtgacggttacacttccggcgggctacg

SEQ ID NO: 1041 - DNA, 146 bp, Homo sapiens
ccgcaggtggggtgagcagggaatccgcaggtggggtgagcagggaatccgcaggcttcagcggcgggggttgaccggcagctggcgtcgagaggcgcttgggaaatggggtctaatttattttagaccctgtccccgactgccgc

SEQ ID NO: 1042 - DNA, 196 bp, Homo sapiens
agtcatggattaaagacctctctgggcagcgttgagaaccagcgaccctaaacttggctgcgtttccatggtgtcgatcgcggagccgtgggggcgggctcacgcaagcgccaagggaccggtgggaggagttcgggtgtggatgcgcaggcgctttgagagacggtgaagccggtggccggtggccgggcgggac

SEQ ID NO: 1043 - DNA, 145 bp, Homo sapiens
ggaaaggaaagagctactcttcttttatagagtcagaccaccaactattggacccaagaaaattcaaaaatccccgcgcccttcttggattggtccatctctgtgcctggttgcagattaagagaggctcctgcccattaccgta

SEQ ID NO: 1044 - DNA, 273 bp, Homo sapiens
cggcgggggattatggcgtcgtggattggcgggcacagggcggggcgggacggcagtgcgggactgagattgatcgaccgcgggggctgccgcgcagagatatccgggccgccggtgggtggtcgctagggctgggccagcctcttggaggtccacgcccgccgagcccacgctggctggggccggggtgccggcgcgctcgggactcgtctcagcagtcgctcacggtctttgtgtcttctcttccgcccctttccctgcctgccgcctccg

SEQ ID NO: 1045 - DNA, 146 bp, Homo sapiens
caaaccttctaattctgcggccgccccagggctgtgagacccagcgtcgcggctgctgggacagaccggggaggctgcccgtgccctcggctattcgggggctgttcttcagcttcttccggctcggcctcctcttctctcctcgc

SEQ ID NO: 1046 - DNA, 155 bp, Homo sapiens
agcaagtagctgtgccccgcctgccgcacctcctacccatgcctgagcgcactttaccaccaccttttaaagtccagacgtctgcgccattaacttcggagtggtgttcgcaggagcatttgtcgcagtggtctttaattgctttaagtcgctgt

SEQ ID NO: 1047 - DNA, 141 bp, Homo sapiens
ttactttctacctcctgaaacgactcggcttgcaagcaaaaagttattccaatgcaaactatacctgatattttcgtgaaacttagaaactaaacctaaaactcgactcccatcgcaatctattactaccacttctgctaa

SEQ ID NO: 1048 - DNA, 144 bp, Homo sapiens
gggcgcggccagcggggaacgcaaaccgcgtccgtgcacgagtccgggagccacagcctgggccacggcaattgactgcgaacccacaacaaaccattcccaccgaagctgtcacgcgcccggagggaagtggccgccgcgccc

SEQ ID NO: 1049 - DNA, 142 bp, Homo sapiens
agtgagaggctgtctcactgagagaagccacaggggtcgggggagggaggagtgcaggaagtgtgctgggggcacatgtcacagcgagccaaaagggtcctccctcccttgagtcacctctttggtaggctgggatgaatga

SEQ ID NO: 1050 - DNA, 134 bp, Homo sapiens
ctctgggaggagggagaaggcctttacacctgagagccatgttacgtgtaacacgtggccccgccgtttggggagacccgttctgcattagaggattttatttcctcccgttgaaggggtgggcaggaggcgtg

SEQ ID NO: 1051 - DNA, 123 bp, Homo sapiens
tctggaggtggggcttcagcccggcggggacgcggtggggcgtggccttgctgttgtgggcgtggtccatgggggcggtgggcgtggcagaggctggtgggtttggtgtcccgttgataaaca

SEQ ID NO: 1052 - DNA, 294 bp, Homo sapiens
cgcccgctggcggcgggagcgcgcacgccgaggggcgcgttgagcgctggggggcggagcctgatgcgggatgattggcgtccgagcgctgggctgttccgtggacccgcgcggccacgccagtgtgctgtgcacgggaaatgtggacgtgggagcacggaggcacccagtactgtggcgtggtgctcgtctggtcgtcagcgagcctcagcgtacttaggacaccgcagtttatctttccttagcgctcctaacggttatggaaaatagcgcttgaaaacctggtaaggacta

SEQ ID NO: 1053 - DNA, 162 bp, Homo sapiens
tccacatagagttcagctttgtttgcttcgtgacgttggggggcacatttctgctttgaaggaaaacgaaagctaccaagttttgggagatgggagatggtgctatacggtctttagggttacgtgaagtcaagtaaaatcgcacactggtgagtttcaaga

SEQ ID NO: 1054 - DNA, 144 bp, Homo sapiens
cccggctggtgctgcgccgggtccctaagactttgactggttagagcaggcgacgccgagagccaggccgcctacaggcgtctccagccctaccccatcgccggctacagagcgggagccccgagccccagcgccgcgccgcgc

SEQ ID NO: 1055 - DNA, 151 bp, Homo sapiens
tgacttcagattcttttccacttctttttggactgagaacgcaacattttgtagcactctggacgttttgcttggacctgatccaggttgtggtatctgtaggacgcactgcagatagtcctgagccagcctgtaaatatatccaaattca

SEQ ID NO: 1056 - DNA, 152 bp, Homo sapiens
gggactttttcaaaagacagagaatgaggaagttcctgcaacagtctcgcttgtatatttctttctcctgatactgcatttgtgagatttgatatcgtatgtatgtccagagagccaactttgagcctttcagtaccaacaatccaggaaga

SEQ ID NO: 1057 - DNA, 141 bp, Homo sapiens
ccaggaggcggcggcgggctcggcgttcgcggtccaggagaaaccaccgcggggtgttgggaacattttgttaaaaagccgggaagctcagggccggtgtggcctccgttctggcctgagaacccggactttgggcagctt

SEQ ID NO: 1058 - DNA, 308 bp, Homo sapiens
ggcccctggattctgagcacgggcggagatcaccttctggacccggaagaatggtcggtaggtcagtccgtccccgctacggtccccgccgggcttccggtcccgctggaaaaggttctttccggaattcagagagttgctgtcgccgctgggggtgggactgtctgcggtgtccgcggcgggcgtccagcctgggaggcgctggttcaacctgtggctcctcccagggtcagccgcgcgtggtgaatcgtttctgcaggtcccttccatttcttactttcctttcctttctttctctctttcctttt

SEQ ID NO: 1059 - DNA, 150 bp, Homo sapiens
cgtcaccccggtgcgtgacgtaatctgaggcgcgccttcgcgccgtcgtccggggagggttttttcccttctaaccacccgcgctctcacactttgcctccgctccgccgtttccatggctccggtttcctactttcctcttgtctcctc

SEQ ID NO: 1060 - DNA, 156 bp, Homo sapiens
actggggccgccgttacctttcctcgacccaccagacccctcaaccacacaacccgagacgaattcccgcctcccgccccctcgactcccagcgcccaatagcccagcgagctcgaccaatcacccgccaaggccaggaatcaaccagtcccggtg

SEQ ID NO: 1061 - DNA, 193 bp, Homo sapiens
ccacacactcacagtttccagacctggctgcttgccgaaactcagattctcggcacctccagcagctggcttcgccaacggcgttgaacaagggtcgcagctcaatgacgtcatatctccctacctacctccagggttccgcctcacgctctatgtcgcgcgcgcgcactacgtcctatggcttgcgcgtgcg

SEQ ID NO: 1062 - DNA, 212 bp, Homo sapiens
tggaactccagcttcactgctctctcgccgtgtggctgtgtgacctcagccagatgacctgcctctctgtgcttcggtttccttatctgtaaaacaggaataacggtggtgagtcactcgagggttctgcgaagacttggtgacgtaacgcttgcgaagtgcttggcacagagtaggtccacgaatagttgtcccttttccttttcccttcc

SEQ ID NO: 1063 - DNA, 183 bp, Homo sapiens
gcgggtcgcacgccgcaaaggcgctgctccgcgtcgccgtacgcctcccggtccccgtgacgcagcccgcggtccggccggcggtgttcagagcccgagcacaaactacttcccgggtgccagaccgccccgaggtcgccccgctgcccgggtcacgcgtggcgctgggtggccgcgagttgg

SEQ ID NO: 1064 - DNA, 322 bp, Homo sapiens
aatatttcatacctagtttctccaaacacggtggggactcttgtagccactgatcctggcagctccctgaagtgtggggtctgcccaacggtggcacagcctggagcctctcaggccagcagggactccagctgcagggggcaccactctcatccgccggtgagatctgaggttcctgtccgggcctggccttcccccacagcgcagccggccaccacatctttgctgcaagcgggactgtgtgctgcttaccggctgggactcaacatccagggagcatttggtcctcccacgcctgtggccttcagtagccagtcccaag

SEQ ID NO: 1065 - DNA, 414 bp, Homo sapiens
gagaaactagagagtggcagccaggcgcagcacgtgggctccatccatccgacacccccatcgccccggtccactccctgacccccagacaaatcggacagttcccttttctggtagagatgcggggtgcgcttcttctgagcgtccggaatcgctccatccaaggctctgccctaaggttaagccactgtgccctgagcctcaaccaccagatctcaaaagtttgctctcaatgcgccagacagtgagtagctgagtctgagtaaaaatcaccccccctccccgtttacgaaaaccaggggtccccctggcaggactaggccgtttgaatgttggtgctagaccctcagactcctgtcacagtccccacagtcgtgaggggatgtacacagtggtgcccactacatgcagctt

SEQ ID NO: 1066 - DNA, 148 bp, Homo sapiens
caaagttgctgcgacacagcctggactcggcagcttccttaaagccgcagccgcggcgggagcttggggtgccgggcggtggctacatcaggcggcctccgcacgctgcccccacccccatcgctcggccgccccaaacttgcttacg

SEQ ID NO: 1067 - DNA, 122 bp, Homo sapiens
tggggtgagggagaagctgacgggacgcgaggctgtgagaaactgggcgagtgtgcgaggacgcccggccagcctgcgggagccgcagtcggcggaggagaaaggaggcggctcccggtatc

SEQ ID NO: 1068 - DNA, 250 bp, Homo sapiens
ggcggggaccccgagaacgccacacctccaccctccactttccaaagaccggcttccccggggagcccccacactaaacgccagcgaactgcctctccgtgaaagtcttagccagaaactttccccgctttgtcgccagtgccacagagagtcgtgtggctctgggccggcgctgctggtccaagaggcagcctggcgtcttctgcccctaccgtccccttctcaggccagttctcacttgcccctgaga

SEQ ID NO: 1069 - DNA, 223 bp, Homo sapiens
gtagggtgaagataattcggagggaggggtctaagagggagccgttattcctttttcctctgccttaggaaagcgcgcgagagggaggggccggaacaacgaacgctggttacctaacggtccggcccagccagtcaggttcccaaagcccacaccgcgcgggccgccgaggtggcagcacagccacaatcgccccaagggctaaggagcacgtcaggagcac

SEQ ID NO: 1070 - DNA, 147 bp, Homo sapiens
cgggctccgggctcggctgtcccccttccgccgcgggtcgccgccttcggtcgcctccgggactccagccgcctgcacgcactcccgattttaaaaacaaacaggcgccgtcgcctccccgcggcgctcgcggggcttccgccagcc

SEQ ID NO: 1071 - DNA, 370 bp, Homo sapiens
gctccgaggtcccccatgcggtgagcgtgaacccttccacagcacctctcggcgccccctaccccgccgcccgcgggggcaaaatctgggggcgagggggacccgggcgctgaggccgctgcccgcctatggggacgcggctgggaccgtggcccggctgcgggtttcagtagcgacatttacgcagtgcatttggtggtctttcttgccttatcaaccccggagtctctctcccctacatcccctcccacaacttcaaggttaaaaaaatagatatgtacatctcaaaaatagcaaagggtccccgcaggcagggccgggtcctccgggccccgaggagcgggcaggcgcggcgtgcacgcggtccccg

SEQ ID NO: 1072 - DNA, 1422 bp, Homo sapiens
ccgccccacgcggagaactaaagaccaccggcggagggtgagggggaccgacacggagcggaaagcaggttccgggactgagggcgtctccggagcctgggcgcgggagacagaaatgagtgaacccagctgatgcatgccttctccacgtggaagaagggaggaaataccagtgggcgacatgcaggtgcccctctcagccctcggagctcccatctcctggcggagtagggcccagaggggccagagtccctccggaggcagctgccccgcgcccctagcccgggcgcagtgagacgcgcgcgcagggtgcacgcgaggggaaggagactgggcgcggataacgcgtgcctggcgcttgcagggcaccatgcccctccatgccaggataaggccccccaccctcagaggcctgaggaatcgaaatctggctttctagcagtcccccaatcccctccgggagtgggttccttgttctcgcatgcccaccgcaaaggccccccgccctgctcccggcgtgtgccccgcgccctcgcccggttccacgcgcacctggatgtggcaggagatctccgagtcgtccagcagccggatggtgcatctcatctcctggctgagcgatttgacgctggagctccgaaagtggatcattttcatggtcctcctgcctctcggcacacagtggcaggaggcgaacatgcaccgcggccgtggggagcgagcgggaggctcagggccggcgcggtgctcgcctgcgcggacacacacgctcgcacgcactgtccgggacacctgggcgcggctcagccccgggacatcggcagcgtcgggcgcctgcggacacacatgcccagcggccggggcgcggcgggcgggtccctccctctgttcgctcgcctccgcctcgccccctcctttccccgcctccttctgtcgcgcgcgctcgtgcgcctccctctgcccgggctcgctcgccgaggacgcccagagcctgagacccccggcgggctcgcgacgcactcactcccacgcgcgccgagcagctgaaggaggaggcggagggatggctggcgcggctggcccgggtgccctggtggtggcctgctcagtcgcagccgccgctgcgtcaagctgggcccgactgccttcctcagcctcaccgcctcctccctcccctggccgctgtcgctcgggctcccggttgtgctcgtcccggccccggctccccaacgcgctcgacagcgccctgctctgctcagctccagggacctggcgcgggtaggggacggagagcgatcctgacccacaccgccagggggattccgcctcgggaaaggattgctgggcccagggcgagtgacagagagagtgacagccctgacacggctacaccaggaatatcgctaatagtaaaaatctctg

SEQ ID NO: 1073 - DNA, 151 bp, Homo sapiens
tgcgccgaaagttccgtgcaccctggcgatcgtgtcccgtacgaggctgctcagaactcggtcatcgaggcttaggcggcagcgggggtcgtcagacaccagttcgcagagcaggtacctgcggcaggcgagaggaaggtggacactagcg

SEQ ID NO: 1074 - DNA, 318 bp, Homo sapiens
gggaagctctcaccgaggctcggttccatcagctcttcaggggcgaagagcaggaaccggagctacctgaagagcgcggctttccccggctcttcgggctgtggaggctgcgggctcgcgcttgttccgggacaggggcgtggcgcctgctgctggctcggctgcccgcgctgcactggctgccccattaccgctggcgggcctggctgctcggagatgcggtggccggagtgaccgtgggcatcgtgcacgtgccccagggtgagaggccctaacagcagcctgtcgggagcacaagctctagagggcttccgggag

SEQ ID NO: 1075 - DNA, 341 bp, Homo sapiens
tgccaaacctcagagctgcagcgagcggctgggcaaccttcctgaggacggcgccccctcgcccagctccaagctcctccctgtccccacaggatatccctggacctggcgggtcactctagccagagcagccttccacagtcctccagggtcagagctacagttgaggaccctgtaggtggtagaggtgcccggggccgggctctggggctggcagaggcaatgtcagcgcctgccacctgcgatgtggccagggaacttggggctgagcaagggcacagaggggagagtgtggcatgagggagaggcgggaccccgcagaggctcccacaccttccaag

SEQ ID NO: 1076 - DNA, 157 bp, Homo sapiens
caacagctctaccatcccttccccccagcatgtggtctggccattttagaaactttcaatacctttgcagaaaggttcgtttctattattgctactcttcctctctccaagctgaaggtccttgctcagagcaataagccatggatacaagagggga

SEQ ID NO: 1077 - DNA, 204 bp, Homo sapiens
cccggggctctagctcgctccgcctaatggcgggccgcaccccgccggcgaagcccacgtttgtaggtccgccctcacgctgatctcttgcccaatcagcgagttcggcttcgcgaggttggtgcccattggctttcgcataaaagctccgaggttacagacgtttccacctcttgccggcctcttaggtaattggcgtccgtg

SEQ ID NO: 1078 - DNA, 154 bp, Homo sapiens; identical to SEQ ID NO: 198

SEQ ID NO: 1079 - DNA, 569 bp, Homo sapiens
aaaacaaaacgagaaggcatcgcggctctgtaacactccgtccagctctcgcactctcagatgcaaacttccacacaaactcctcggctcgccttgtcccgcgggactagcatatcaagccttccgggacacaccgtgcgatgatatatacgtatatacccctcttgcccttgaaggccggaagtcggtcttacagataaaagcgaaacaggaagtcccgcccctctatggaaagtaaatggtagctcggaagggtcaaaagagtccgcggtttcgccgcgtgagttgctttttgcggctggggaggtctacgcttctagagcttgagccagcggggcgaccctgcagtggcaggactcggcaccgcgccctccaccgccggttggtggcctgcgtgacagtttcctcccgtcgacatcgaaaggaagccggacgtgggcgggcagagaggtcggcttgctgatgggtccgggtggggcgcgcgtggactatgggcccgggaggtcccttactgtccccgagccgcgggttcctcttgtgcaaaacggggtggcactccaatcgcctgc

SEQ ID NO: 1080 - DNA, 145 bp, Homo sapiens
gcccttcgctgttagcgcttaggatctggtgccttttcacgtgggggcgggtgggcgggaggcgagtctggggtcttcgggccgggcctccgctctctggcagtttgcaccttgctccactcactggcctgcggtctgtgttcac

SEQ ID NO: 1081 - DNA, 359 bp, Homo sapiens
agggaagatgagacagagagacatagagagacagggacagagggagacagagagggggctaagagcgacgcgggcgagagaggaagaaaggctggggagaaggaaaaatgagataaataaaggaaaaaagagaagcgaagggcggtgggagaggcagccgggcctctctgggagcttagccagaggcgcccgtacccccctcccctgcgcgtttgctgggagccgctccctttcccttttctttccaagctgccgaattctgtccctagacgctacgttcccagtagagggtagggccaggatccaaagatgccgaccgtggccgtggctctctggaagcaggcaaatgggatggagaa

SEQ ID NO: 1082 - DNA, 197 bp, Homo sapiens
agaacctccatcccattctgtaaggacgaaccccggggacgtgaggccagatgtcactacggagggaggtagaggaaatgggcttgggggaggggcgcgatacttcctgcctcctctttgttggggagagaaaggtggggctgcagcaagcagttagggtcgcagttaagcgcaggatcctgtagcccatctcatgg

SEQ ID NO: 1083 - DNA, 270 bp, Homo sapiens
acctcccacccgctgattagggggctggaaacgggcttacatcactgtcagggcaggagaggaaaaattgcaaagtaaacggcaagatgttgccgcgatagcgagcaggaaaatctgcagtgcttaggagaatgcgggacccaaatgaaattccgcgtctccccgcggcgggtgccgcagagccaccggcgaggggcgggcgccaccacgtgactgattattcaaatggaccgatgattaactcggtttatattgatgcaaataatcctg

SEQ ID NO: 1084 - DNA, 81 bp, Homo sapiens
ttccaatcaacaaactgaactatctcagagctcaagcggaaggccggactacaagtcccggcatgctccgcagggtccccg

SEQ ID NO: 1085 - DNA, 137 bp, Homo sapiens
cagcgagcgagagcgaaaccgagaggcggcaacacttccaggagctgcgagcgcgctcagacagcaaatagcgacttcgtctttcccagacccctgccgcctgcgctcaccactccctccccgcgacccctcctgcg

SEQ ID NO: 1086 - DNA, 277 bp, Homo sapiens
aaaaggaacaaagagggttggaatccagacgttccatgactaaccccaagatgactaaaccagctactgaatgcacccacagaaagggaagtgacatttactgagaacacatttagtgttgctgaacgcttaaaatgctttctttgtgttctcagtccttaccagtctgtgaggggggtttattttgtctacattacagatgaagaatctcacctgcaaatgaagaaagttggctggccgacaggagatcgtttgaaatgaaaggattccagggttt

SEQ ID NO: 1087 - DNA, 177 bp, Homo sapiens
acctctgtcagagaatgaaacactcatcgcatggtaaggctggtctgagagcaaggtcaagataaagagccatatcctaaaaaaaaagagaagcagccaaaagctgtttgggtgtacgggaggtgagcttgggaatacctcagtggcgaagggatgtcagaggtagtatgaggtgaa

SEQ ID NO: 1088 - DNA, 146 bp, Homo sapiens
ctggacagcagcccagccacgtgcccagcccgtgggtgcggtttcccagggcggccccggcgccgccgcccacgccgtccacctcctccaagccgctgtggttcaggaaggtcgcgttcatcgccgcgcggcgccgggggtctcgg

SEQ ID NO: 1089 - DNA, 143 bp, Homo sapiens
atccgccgccgccgccgtcgggccctagcgagggcgcgctccccggggacaggcagcggggctcctccgagcccacggggctcagctccacctccgataggtcctgctcctccgccatgtcgcccccggccgccgccgccgcc

SEQ ID NO: 1090 - DNA, 124 bp, Homo sapiens
gctgctggccgagcgccggcccggcccccgagctccgttcctccgcgcccagcgccctccaggccgcggtgtgtccgcccctgccccatgctttgccttcggagctgctggagacaatttaatc

SEQ ID NO: 1091 - DNA, 204 bp, Homo sapiens
ttcgcaagcctgctctggatgcagtctggtgttacataaccggctggctgaggacgcaggtcccctgggcgctgccggcgcgctgtgaccagacacgcgggcgcgggtggggggttccgtccagcagagggcggcaaaggacgcccggcgcggtcccacggccctgcgggcgagcagcaagctactgcgttcccttcgggaagg

SEQ ID NO: 1092 - DNA, 133 bp, Homo sapiens
tcgcttgaggagaccgggaagatcgttcttgtccgggtgaggccgccaggacttgtgggctgcgcggtcctgtcgtgttccctgaggacagttttattttcttgtcagtggtgcttacgggttctctttcttt

SEQ ID NO: 1093 - DNA, 180 bp, Homo sapiens; identical to SEQ ID NO: 500

SEQ ID NO: 1094 - DNA, 147 bp, Homo sapiens
gcagaagcagctgaggaaaccttcccttagcggaagctggaaaggatcagaacaatgaatggaaaagtcctttcaaaacgctttacatttgacagattcttgttgggtagctgtagaataacggtagtgttcagccctggttggtta

SEQ ID NO: 1095 - DNA, 138 bp, Homo sapiens
cccagaatgcatgacttgagcgccggccccaggctgcggggtctgccgggcaatgtggtttgccagacgttagcgtccgggaaggaagagtttttcgccaataggctttcggcattaggttctcccgccgagcaccct

SEQ ID NO: 1096 - DNA, 157 bp, Homo sapiens
gcaagatttaaggaaagaaaagaaacataaggacctccgttcttcggtctccgtcccctccccttcccccgcgtgccgtccccacaacgggccaggactgaacccaactctcgaccaactcccggcagcaaaactaagcaccctacttccgttgtcc

SEQ ID NO: 1097 - DNA, 147 bp, Homo sapiens; identical to SEQ ID NO: 190

SEQ ID NO: 1098 - DNA, 116 bp, Homo sapiens
aggtgggggtggggacgccccgtctaagtgggtcgcggagcgatgctcgctctaagccgccagggggcgcgcggagccgggtctcagtgcgcatgctccgcaagtccctgcccgcc

SEQ ID NO: 1099 - DNA, 331 bp, Homo sapiens
cctcccaaatgagtataatgaaaacccgagaggcgatattagtgtaaagatcgggattagtccaaataggagccgcggacttgggcttcaaaggcgacccctactctttttgcccagtctgggggcggagggcgctcgaagggatacttcaaggacaccacatccaacttgtcgcagccccacgttcaggcacaggagggagcgaacattgggcagagggtaatttcaacaaaggacggcaggctccggggatcccggcttttccctgagttctctgggttggaaggagagggtccgggctctgtcggaggagtgggtacagcccagcaca

SEQ ID NO: 1100 - DNA, 186 bp, Homo sapiens
gaggaggaggacccgctggcagtctcctcccaggtggggagcgtggagcctgtcactgcagcctggcggcctgagcgccgagcctggggctggggccgcggtgctgaggacgcaaatgtggtgagcacgcgatgcgggtgcggtgaccggggctggtcgggccgggaagaaggggcgccggatcca

SEQ ID NO: 1101 - DNA, 147 bp, Homo sapiens
ccctctctggggtccggacgggaccgggctcggccgggcgggctccgggaggagacgcgcttacctggaggtagggccgcccgtgggccaccccgcccacgacgatgtcggcggacgccatggccccggtgggcgagaagccgaagc

SEQ ID NO: 1102 - DNA, 248 bp, Homo sapiens
ctgggccgcgcgtgcgcgcgtggggttccggaatgagccggggaaagcaaggggaaggtttggggttggctcccggtttcgcgcatgcgtgcactgcacaaaccatttggcgggtttttccggccactcagttctgccaccgtcactgagaagctcagcggtagcttttgggaagcaggacgttctcaccaggagagcgtcctctcgagatttctgctccctccattcagggcgtttgggagccaccc

SEQ ID NO: 1103 - DNA, 131 bp, Homo sapiens
cccagtctgtccctgcgcgcaggctcgtggcgcggtcacgcgatagacccgggcctccggagtctccgtgcgcatttcctcccagcggaattcggccagcccgcgggaggcccttctgtggctgctcgggg

SEQ ID NO: 1104 - DNA, 396 bp, Homo sapiens
gtgagggagaggttccgccgaatgaagggaggaggtagacggggccaggagaaaggagaaaccgccccggcggggcgaagagcgcggctctcgagctgtagtctgcaggagacacacctccctccctcacgcccctcggggctgcggaagtgctctacagactggagctgcacgaaggcgaccagcggactaccgttcctaggaggcagcgcggcggtgcgcctacggctcccggcagcccccgcgcgccattctctttttgagttcgcggccggctagggcgaaactacagttcccaggaggactcgcgcgaagcggcttggaagtgggcagcctggaagtcactcgggccaccggagctggcggcgtctccagcgagcggcgcggagctggacg

SEQ ID NO: 1105 - DNA, 135 bp, Homo sapiens
agggcacagcctgaagcctggggaaccctctctcccgaggcttgaaccgtctcgaccccacgcgaccccgcagccccgatagcgcccccgtgcgatcaccttgaggttcaggaaaccgtgctcacccagcgaggg

SEQ ID NO: 1106 - DNA, 146 bp, Homo sapiens
aaaggcactggaggattgagctaggtgggcagaaaagagcagtgagtgttttgggttttttcactttcaggcttaacgcctcactgctagcacaagccgcccttaataaatcacacttaaaaaggagcttccggggtcgggcgcgg

SEQ ID NO: 1107 - DNA, 145 bp, Homo sapiens
ttcattcagcgagactacagcagtggcacacgctgccagttccagaccaagttccctgcggagctggagaaccgggtacgcaacctggctccccacgcctgctctggcgagggagagagactcaccggggacgggaagggtgtgg

SEQ ID NO: 1108 - DNA, 141 bp, Homo sapiens
agcctcgcctcctgcaggccggctcgcaagaacgcacggccacccacccgcgccgcggcccacagcgcgcacccacactctcactggcactcgcacgcgcgcccccaaccacaaagcccgtccgcggcgggacagtgtgag

SEQ ID NO: 1109 - DNA, 268 bp, Homo sapiens
ataagtgcctggagagaggaaatgacaaccgactacggcagtgaagatggggatcggcagatatacagcagcactgagacacagaagcactgtgtggagagggtgagtgtgaccactgggagatggcagaacatgacgacaaaggagaaagggcttctacaatggatgtgtgagatcagataaggcttcctggaggaggtggtgtgtgccaagccctaatggatgagtaaaacgtagccagataaagtggcaggtgttgcctgtgttc

SEQ ID NO: 1110 - DNA, 145 bp, Homo sapiens
ggtcagtccaaccacagtcatatcagggcccttccaggaattctcgacgcaaactggaggccgatggcgcgggtcttttcgtggacggcggcagcacggtcctcggcttgcgtccgtagttgctcaggcttctggttcagggctg

SEQ ID NO: 1111 - DNA, 189 bp, Homo sapiens
atccacaaacagctttccacccaaacagcgaaagctgctgagcgtgcccagaggaggagacggaggcagggagttccacgactggccatgctgcagcgagcagtgccatgaagatttatgagatgtttaccacactcctacagcatcgcacaggataagtgttcaatgtggcattattattcacattag

SEQ ID NO: 1112 - DNA, 135 bp, Homo sapiens
tgggtggtgacatcatgggttgagctgtgccagttctttcccgacctcggaaaccccaacatcccgctccaggaactggcctgcggcgttggctttggctgggcgccccaggagtgtggcagggaggcccggggc

SEQ ID NO: 1113 - DNA, 152 bp, Homo sapiens
agtgcggtgactgcgctgggaaacatggcgaccgagggaatgatccttactaaccacgaccatcaaatccgtgtcggagtccttacaggtaaccgggggaggaggtctgggacctatgaggctgctgtccctgcattgccttaggcttttcg

SEQ ID NO: 1114 - DNA, 154 bp, Homo sapiens
ccccagaattcatcatttcccaaacaactgaaaagacacaatgaatgcgggcctcgtgcctctttctgtttttattatgactgatttttgcaaaacaggaagtgctgccgtgacaatggtattatttgtggctgagaaatatacttttgaaaac

SEQ ID NO: 1115 - DNA, 137 bp, Homo sapiens
gaagcggggagggcctcgaggggcgaggggccgcggctgggatgaggcgcgccgggagccgcaggtgctggggaggcaacggcgggacggcccgcacctgagtttcctcggaagcgggaaccggctctgaaaggcga

SEQ ID NO: 1116 - DNA, 252 bp, Homo sapiens
ggtggcgcgcggctcccggaggcaaaacaaagctggggccggggcgtcggagcctccgcgttgtagttgggagaggttcgaacggggccccagctggcgaaagggaaaacggacccggacccggacccgtggagcctgctcgaaagccgggtgctgggggtctgggccccgtgtcccccctctttttcttcttcaataagaaattcctcaagggcagactgcgagtccacagtcgtgaagccacctaatctg

SEQ ID NO: 1117 - DNA, 217 bp, Homo sapiens
cttaaaaggactgcttacagaacgaggtgctcgccagaagcaaaaaacaaaggatggatgacagagcttcctgcaaatgtttgaagcactattgtgggcaagagggaaatgctttgttttgtttggtgccagaggatagaattagaacagacaggaagagtttctaaagacccagactttgcatcaacgtgaaaagaacattgtaacagttgttcag

SEQ ID NO: 1118 - DNA, 145 bp, Homo sapiens; identical to SEQ ID NO: 574

SEQ ID NO: 1119 - DNA, 117 bp, Homo sapiens
tgggcagcaagaggctgcagaggggggagtgacatcaccgccggaggaggggcagcaccgctcccccaacccaggggcttcaagctccgcctttatggcggaccccggggtcctgga

SEQ ID NO: 1120 - DNA, 141 bp, Homo sapiens
tccatcacccaagcgcctacccaagctggttctccgagcctcttgagtctgtttgcaccaggcctgcgctcctctacagacccagcagatcacgggcacgcattcgccacccaccgaacatgggcttgaggtgggcacgag

SEQ ID NO: 1121 - DNA, 165 bp, Homo sapiens
ataattccatagcattgtgccactaaagtaatcacagagcttgtatatgcctacgtgagtgtgagtccatgaaaacccacacaggaaagcattttttgtttctccgttgcctgctcaatggttgttgcacagtaagggatgatgtgatggacagcccaggaaacc

SEQ ID NO: 1122 - DNA, 150 bp, Homo sapiens
gggaggctgtagaccgtaccaagccggcccagaactgggggagcacttgacaactctgaccagctccctgcagaaacgctttagaagcgtccacgatttagccaaacccagagtgcccaacggacgcgccaaagaagaaaaacggacgga

SEQ ID NO: 1123 - DNA, 93 bp, Homo sapiens
tgtattctagacttggcgcaggcccctttggggagaagagcccaggggctatagagaacagaggtttgaaggaagcaaaagctggcgagaggt

SEQ ID NO: 1124 - DNA, 271 bp, Homo sapiens
taaacacatgagcgagaccgtctgtgtatttctttagttccctctcctctccagctctgccaatgctagccttcttggtctacgcaaaatctcagcttcctcttctcaactcaggtgtctgccggctctctgcctgggtttcccctttacatgttgtggccagaactctctcaaggcagtcagctgggcagtatcagcgctcccctggtttgttccctgtccctcaggggctaacgttctttgttgtctgatgtgtcttagaatttttctt

SEQ ID NO: 1125 - DNA, 157 bp, Homo sapiens
acaagtttcatcatcgccgtcattcctacataacaaaataacactctcttgcgaatgagtttatttctactgttggacgtgtggttaagagtgggagttctggaatgggatcaaagtacaaggcctgacttgcaggaagtgttatcttgagcaagaa

SEQ ID NO: 1126 - DNA, 145 bp, Homo sapiens
gcagcaggcgtgaacccccgtagcctaaatgacagccgaagaggcgccgaagacatgcagatgtgccaagcggcagtcacgttgctgccgcgttgtccgaccccgcttacctcctgatgtggaaatccctgtgggtaggaggaaa

SEQ ID NO: 1127 - DNA, 143 bp, Homo sapiens; identical to SEQ ID NO: 128

SEQ ID NO: 1128 - DNA, 130 bp, Homo sapiens
agaacacgggtgtcctgggtgagcggctttcccgcccctccccttggctcacagagctgctctgtccgccggccgacaccggcctgagccagcgcccttccagcagtcattccacgtgggtgggtttgga

SEQ ID NO: 1129 - DNA, 143 bp, Homo sapiens
aaggatggagaacgggaagtggaggtgcccaagccgttctgctggtatagagccgagctggctggagaaggttccgtctcgattcaggctgtggtctggattcctgccagccacagagacctggcctgagcttggccttggca

SEQ ID NO: 1130 - DNA, 147 bp, Homo sapiens
ccgaggaaacttggatcgctggcgccgcgggctacgttcagtggttgccagagagacacgtgaccggcagcgggggcggggcctgcagggagccacgccccgcacagttaacagacgggcgctcagggagctagggagctgtgaagc

SEQ ID NO: 1131 - DNA, 222 bp, Homo sapiens
gctgtctgcgcctgcgcccggcgtccctccttaaatgtccggcggggaggggcctgtgacctgaggccaccggactctcgccgcgggtgcacctggctgggcgtgggccagcgaggggcccggcacccccagcccgcgggatgacctcacctgtaaagtgtgcgtagacaccgccctgcagccctccctcccggcccagacacaccacagataacaagaata

SEQ ID NO: 1132 - DNA, 144 bp, Homo sapiens
ttatgaaaagacaaagaaagacccgttgggaaactagtggtactttctaacgtttttgcaaaaatgacttcctttctgtgtgatcatggcctgaaacttgcagaaaacggtcatatcatgtgttccaacaaattttttatcaga

SEQ ID NO: 1133 - DNA, 157 bp, Homo sapiens
ccacgagtcccaggatggagccgcgggcgccgtggatggagcaggaggggccggaatattgggaagaggagacagggaccgccaaggccaaagcacagttttaccgagtgaacctgcggaccctgagcggctactacaaccagagtgaggcctgtga

SEQ ID NO: 1134 - DNA, 132 bp, Homo sapiens
caacacacttcaccgcgtccgcctggggcaggtcagaaaagggacgcgaggcggcgctgtcacagcattctatgcgccccagcgccctgggccgcgctggtcttgtatcatttcagtggtccctcccgtctt

SEQ ID NO: 1135 - DNA, 142 bp, Homo sapiens
ggacagaaactgaaattgaaagtgagtagtgggttaaagcggaattactgcagatggtgacattgaacaggaaataggtagttaagacacaggaaattgcacgtcagtaaaaagacacaccaataaagataaggaacagaaa

SEQ ID NO: 1136 - DNA, 221 bp, Homo sapiens
gacccctaggtaaggaggccgctaggagacgctgtggccacacggtggcgctgtcggcccgggactgaatggagggcccgaggggcgcaagctcgggggtcaggatcccctttccagggatcttccgaggcgggcggtagccggcagccgcaggaggaaagctctggggcctccctggccctcccccactgacccgcttcttgtagtagatgcgccacttg

SEQ ID NO: 1137 - DNA, 247 bp, Homo sapiens
tccgctcgcgcagcatcctccccgccgcagtgcccgcgctcgctggtccggggcggccgggagcacctgcagcaggtgcgccttctccagcagcctgcgccccacggccccgcgcgcagccttatccagcggccggtgggcggggcggcccgccccagtcctctcgcagtgggctgcgggcctgtccgtcaagcgtggtcccgcccctaactcgtcccgccccgctgaggtcgtggcgaagtcatca

SEQ ID NO: 1138 - DNA, 153 bp, Homo sapiens
aggaactggaacacgcacgggattcgtagaatattcgacgggggcgggggatcgactctgataagataattctgcactgcgtggggtgcaggagagggaggagactgcacgttcggctccggcctcctccgcgccgggctcggcaccgatccg

SEQ ID NO: 1139 - DNA, 196 bp, Homo sapiens
gttttgcttcgttttgacttccgcaccccgaagctgtagcaccagtttgttttctcacggcacaggggcggcttccggggcgcggcgtgctgggggttgtagtccgcgctctgcctcctacttccattacagaaggcgatgggccgagagctgaggaactacaactcctagagtactccgcgccgccgggacgccg

SEQ ID NO: 1140 - DNA, 149 bp, Homo sapiens
cgcgccctcctcaccggcccgggacgcggcgtccccggggatggcccgggcagggacggcggggggatccccggtgcgcgccccaactcgcccccaactcgcttccaaggcggcggtggcgcccgtgcacttggtcgcggggccgcccg

SEQ ID NO: 1141 - DNA, 303 bp, Homo sapiens
gagcctcagagcgaggggaggccgggagcagcgccccggaactggcgcctcacagacagcgcggggcggccgccacggtggcgggaaggccaagcgctggccctgggttgttcttcacccataaccccttcacctgtaaccccaacaagcagcgaaaggcagtcccgggccctcggcctccccactcaccccgtgcccatcgccggacacagtccgtcggcataaactttccgtcggcataaactttccgtccgcgcgccacagccggaactataaggccgcgcgacagaagggaatccggcg

SEQ ID NO: 1142 - DNA, 253 bp, Homo sapiens
gaggaggagcctgagaagcgccaagcacctcctccgctctgcgccagatcacctcagcagaggcacacaagcccggttccggcatctctgctcctattggctggatatttcgtattccccgagctcctaaaaacgaaccaataggaagagcggacagcgatctctaacgcgcaagcgcatatccttctaggtagcgggcagtagccgcttcagggagggacgaagagacccagcaacccacagagttgagaaa

SEQ ID NO: 1143 - DNA, 144 bp, Homo sapiens
tggaggctggctgatcaggactgctgtaatctccgaatacggagctggcggcttcgacggccaaaagaatagaaaagagcaaaatgactcatgataaggtccacttgttttgcgggacctcaccgcaagtgtagatgggcactg

SEQ ID NO: 1144 - DNA, 155 bp, Homo sapiens
agttccctgggcgcgtaccttccaggtagaacgcccggcagccctcgtccttgagcttcttgagcagcagcccgagcaccgactcgccgcccgtattctcgttccagtcgctgctgctctcgtcgtagagcaccactgtgtcggtgccacagcgc

SEQ ID NO: 1145 - DNA, 136 bp, Homo sapiens
tgaccctaccgcctcccgaagcgtcgggaccacaggcggcgagccaccggccggcctctgtgtgcaccgaggagccgggcagccaccgccacgatccagctttaggacatttccatcaccccactcagccttcctg

SEQ ID NO: 1146 - DNA, 230 bp, Homo sapiens; identical to SEQ ID NO: 155

SEQ ID NO: 1147 - DNA, 148 bp, Homo sapiens
tgcacgagcagctctctcttcaggagtgaaggaggccacgggcaagtcgccctgacgcagacgctccaccagggccgcgcgctcgccgtccgccacataccgctcgtagtattcgtgctcagcctcgtagtggcgcctgacgtcgcgt

SEQ ID NO: 1148 - DNA, 137 bp, Homo sapiens
cgcatgcgcgggctgcggccccgccccaaagggcggagggggagcttttcaccagatgtgcggggggcggggccggtcggccagggagacctctggcagctcgcgcctgcgatctgagcttaattaaacttctcccg

SEQ ID NO: 1149 - DNA, 180 bp, Homo sapiens; identical to SEQ ID NO: 96

SEQ ID NO: 1150 - DNA, 150 bp, Homo sapiens
aaagggagatgctgcctccttggctctgggggtggtgacgggagcggggcccactggggagcgatttcacttaaacggtcggacatagccgtctcgggcccctagcagtctccgcactcactgcctccttctcgaacatgctaggcctcc

SEQ ID NO: 1151 - DNA, 149 bp, Homo sapiens
gcccgtcggagcgacgccgctcgggtcagtcggcggccggactgggaagatggacgcaggtgaggagttgccgggggtcggtctttccgcaggaggtgctcgccttatcattggcctcccctgctcgggtcgggctgccgcgactcgcc

SEQ ID NO: 1152 - DNA, 148 bp, Homo sapiens
acaccacgaatcccaacgcgcggttgctggcgggaccttataaatccccggagagccgccggttgtgtctcctggcggggactcccattgggtcgcagctggacagagatcggatcgtcccccgcgcgactctcactgggccaggccc

SEQ ID NO: 1153 - DNA, 150 bp, Homo sapiens
cgccgcccttacctttacgtacaggaaaaaatcgccgccgctccgttccctgcatcgctgagtcagaatgagacagccgactaacgccactaagagtcaccaggcgacgacaccacagccctcctcacgccttaaggaggtgatgctgga

SEQ ID NO: 1154 - DNA, 170 bp, Homo sapiens
ggcacttccgggaccactctaggccgcgcggaggtcccggcgtctcggtggtcccaccgcgccggttgtcgccgcgcgaagccgcccgggccccgggacacaaggacccgaatcaggagagtctctccagtcggcatggtggctctggccgtccccgaagcgcgtgctgg

SEQ ID NO: 1155 - DNA, 150 bp, Homo sapiens
ccggacgcccggcgtccggcgctggctccagaaaggcggcgggtgtggggcgcagaggcctatctcgcgccctagccgcggcccgcgccccgccgcagtccccggggacggtactcacacacgcagagctccaccacgtacgcgtagtag

SEQ ID NO: 1156 - DNA, 147 bp, Homo sapiens
gctggccacgccccggcccggcctctccgttcgcgcgcagccgcctgcagacccggaagtggatggcgtggagatatggcgcaactgcggcgcgtgagttttcctttgtttagattaagtgttcgcttagcggtgccctcacgcttc

SEQ ID NO: 1157 - DNA, 556 bp, Homo sapiens
cccagtggtagcacccccgggaaccgcaggtgttgatttaaggctcggaacaggcgggccttctgcccacatcctgcggcgcccgcgacccgggccgggcgatccggcgccgggttttgttatccgcccgcacctagaggccgcaaggcagccgccagccccgggactggaccccagggcgccctcggccctgcgaggtccccgccctctcttccgtctcctcctcaccgccctcctgaggcactctgatgcgggcgggcatctctgccgaaaacacctacagcgcccgctccctcggtccttcgagcagtgatccctccgcggccaacctccccagggaaaccagcgattcgcggttcagatagcgaccttcgcccgcaggttcctgctctgccttcagacttcggcttcagtggcacctgctcagcgaggcctcgtctaaccaagccatccgaattaactacccactcactcgccatcacatcaccccgatttaattcgcagcggggcactgactttacactcgtgtgtcttctgtgtttatttatggtctgtt

SEQ ID NO: 1158 - DNA, 142 bp, Homo sapiens
cacaacagtttcatctcagttattgtgggattcaatgaggtaatacatagatgaagcgccgcctggcacagggtacgcactcaataaatgtgtttcctgtctcccttgctgggtaggggtggctcagacatcgttatcagtc

SEQ ID NO: 1159 - DNA, 134 bp, Homo sapiens
ccccggcgctcggcccctcccccacgcggtcccgctggctgtgccggactggcagcctcgccgtttcccactgcgcctgctgctgcgcgggtgcccaagccgggaaattctccctgcagccccctgccggtgtt

SEQ ID NO: 1160 - DNA, 150 bp, Homo sapiens
aaacggtgccagtgacgctggtgccaaagcgggaaggaacgcattcttcagcctaaaagacctaacagtaggacacggacataaccactcccggccaaaaagaacacagagcaacacaacgtcttggctaacgaaaactcaaagcctcaa

SEQ ID NO: 1161 - DNA, 157 bp, Homo sapiens
aaaaaattccagccttaattcaaggatgtttatgaaagcaaagttctctgatcaaataagagtaagtaaaaacgggtgggcgggaggagtgtgcttgcttttgtcccttgttgctttggagatctactttgatacaggagcactgcagatccccttc

SEQ ID NO: 1162 - DNA, 299 bp, Homo sapiens
gcaaataaatgtgtgacagcttaagaggcgaaaagaagagtcttcgtcaaatggcagagtttgattgtttaacctagactaatcagtctttggagggcctgccacatgtcttccagacggctagaatgctcaggagataagagtggggcctatcgctctgtggctttctccccctgcattagccgcagagctgagtgagtctatgaaaacccattggtcgggctgccctagcaacacagaatgctgtgctgacacatactccatcacatgtttgcgatgaaaatgctgtatttttagaa

SEQ ID NO: 1163 - DNA, 149 bp, Homo sapiens
aacctcagggtttcttggaatcctggtggcggtggcgtcagccagcaccactctgacgcagtgtccactaggccgccccacgagaaggaggcaggcgaccccatccccagggcagaaggcacccccatccgtggcactccagggacccg

SEQ ID NO: 1164 - DNA, 138 bp, Homo sapiens
ctcggcctcctcctcctcctccgcggcggcagcggcgggggctgcggtgttaccggtgaagaagccgaaaatggagcacgtccaggctgaccacgagcttttcctccaggcctttgagagtgagtgtgtgcgaggctt

SEQ ID NO: 1165 - DNA, 159 bp, Homo sapiens
aatgagatcagatttagattgccaagcctcgggtgggacccttggaggtcagaacacagacaaaaggaaacaggaaagcatgtttaagagtaagagaagggtagggctagcttcgtggtcatgtaaccatgtgaacttgtggttgcacaagttcccatg

SEQ ID NO: 1166 - DNA, 161 bp, Homo sapiens
ggggtgaggcgtggccccgactgccgggccgcgataagcgccctgcgacccggctgaaagcgcacacgtgtcctgccgcgctgagccgccagcaggactggtaccaccgccctccctcggggctagggtcaccctgccgtgacacgcagggacaagccaaa

SEQ ID NO: 1167 - DNA, 244 bp, Homo sapiens
taaattctgtcaggcccagtgtccaagtgtccgtttatctgtccgtttgcatatgaccgtagatcggcacgccctgctccagctgcggcatgtgcagggttaaggcgagaggaggtttccctgagtcggagggggaggggggcgaggggcggacctggcccagccccgccccgcgccggagcagtgccggagccccgccagagcccgacttcagccccagccagatcccgcgtcaacggaggcg

SEQ ID NO: 1168 - DNA, 145 bp, Homo sapiens
cacggcgggcgggaggcggcacagtttgcccgggagcacttgtggggtttcatcaagaagcagaagggtttcacctcgtccgagccggctaaggtttgcgctgccatccgcaaaggctttctcgcttgtcaccttgccatgtgga

SEQ ID NO: 1169 - DNA, 249 bp, Homo sapiens
ctccgctctgcgctgccgtcctgggcacacggactcgcgccgctcccggggaggggagagagccaggaacctcccgctgcggtccagggttgccacgcggaccccagaggttcctgaatcgcactgagctccccggaaaggaaaggacgttcccagagttagagaagaacggagagcaaactgaagagagaccccgttccctttagcagtcggctggcctgtttctccatccccctcagccctaagcaa

SEQ ID NO: 1170 - DNA, 192 bp, Homo sapiens
aaaggtcacctggtcggtggaggagagcggggtgttaaagtcccgggagaggaggcgcagagtgtgagggcatcggcgcggctcggctctaaagcaaacaggggtccgggaaccgccccttcatttgggaccggggaagccgcagccctcttcacacggatgattcaaagttgcgcgccgccgtcctcccga

SEQ ID NO: 1171 - DNA, 145 bp, Homo sapiens
ccaccgacatggcccgggccgggcggggctcgggccccggctcctggctgccccgcggctctcagtccgcggctggcccgcctggcgccatgttcccgggctggcctggagtttctcgatcttctcgctcttctccgacctgccc

SEQ ID NO: 1172 - DNA, 170 bp, Homo sapiens
aaaaaaccctaactgtaaatattatttggaggtgggcgagggcgcggcgtgcgcgcggcggcgggtggcgggcggcgcgggcgcccttgcggggattcccggtctctcagcgcgccctagtggacgccctgcctttcgctggctccccgtgctcgttacaatctgcaata

SEQ ID NO: 1173 - DNA, 222 bp, Homo sapiens
tgaatccgacacccggcggatccagtgcggagtctcgaacagctgcggagctgggagctacgggacatgaagagagcggggtggaagagaagacggcggaggaaaatcccccggcgatgctcaactgcggctttctctctcggctgtgagccggctccgccctccagcttccagagccggtggcttctgcgttcaccgccccgcgccgtttgcggggcgggg

SEQ ID NO: 1174 - DNA, 138 bp, Homo sapiens
tttctgttatctgacattttgctctgcttccctctgcccactccccagcgggattccctccctggcagacgcgcgcgccccagcccgccctcgcacaacctccaatagcaggtcaactggcttgtaacgctggcttag

SEQ ID NO: 1175 - DNA, 147 bp, Homo sapiens
gctgaacattggttctctgtgcggggcggtggcggggattggagggcgggagctgtgctgacttaggattggcaaaatcgctatcagccacgcctctaaaacccggaagtaacctccccggtagtcccacgtgtagcggagaaacag

SEQ ID NO: 1176 - DNA, 155 bp, Homo sapiens
gcgactggagagggcattggccaggagaagtgagacgtggacaaaaggcgggactgggaagggatctctcgcttcgacccgcctccgacccgcggagttgccccctgaggactaccagtcccagtgtgcactgcttcttccccggctctcccgcg

SEQ ID NO: 1177 - DNA, 148 bp, Homo sapiens
aaaacttgcaggggggaaaggggtggatagatttgtcttgggaagagaggaactgtgcaggtatagtcgagacatttgcagactgaacaacaacaatctgccttggcaatgtttgacagtaaaaatcgctcacacacctatacagtaa

SEQ ID NO: 1178 - DNA, 276 bp, Homo sapiens
aggactctggcgtgctacaaaggattgcacaactcgaggctgggagcgcggagcgcccagcggccggccggcgcgcgcggcaccgcggcgagcaggaaccagctctaccacttcatcagcacaactgtctcggggcggcctcagccagcaggcccggcgccgcccacttcctgcgaccaaataaggccggggaaggcgtccttaaacctcaggcggcggccggggctggggatttccagcagacctcacctccactcacgagtcggtcgccgtccc

SEQ ID NO: 1179 - DNA, 157 bp, Homo sapiens
accattggccccagcgcagacgcgaacccgcgctctctgatcagaggcgaagctcggaggtactggagtggggctccgggagtctggctttattttcctcctgttgtgccagggggcctgagggtgaaccctgggactctagttgtttatgaaaacg

SEQ ID NO: 1180 - DNA, 164 bp, Homo sapiens
caggtttctctctatttccggtgtattgtatcctcacgtttccggagattgacgttgctcttgtgttctcgcgagaggcgggaaagggcgcagggtttgaaacatggcggacgacgtagaccaggtaagtgtattttaaggaggtcgctcgaaggagcttcttg

SEQ ID NO: 1181 - DNA, 173 bp, Homo sapiens
agcggcccgcggggcggggcttgtgagctggggctcccccggagcgggcgagttggtaaacagatccggagcgcgtggcgggcgtcagcgcggtggccagcgcgcagaggcgggcgcggaggcggctagaaggtgaccgcggatcccagcttcctgcagccaggtaaggctgc

SEQ ID NO: 1182 - DNA, 141 bp, Homo sapiens
ttcacccggcccggccggggcagacagcacgtagaggtccgtgcgtctcgatcccgggcagccccggcgggcacctgtcggacccagggatcgaactctgtgaaggacccggccgctggtagcccttctgttcccaggccc

SEQ ID NO: 1183 - DNA, 175 bp, Homo sapiens
ggtcgaggagagagaaggggctcaaggcgcccgaaaggaagtggtggagcactgggttgttgcaaagcaacttcctcctccccgccggcccgcaacctcaagtccgttccacggcccggtgcctgtggtcccctccccgagggtcgggcgggaagactgatgctgggtgtgcctg

SEQ ID NO: 1184 - DNA, 139 bp, Homo sapiens
gcagaaacataacactaatcatgctcctagaataactaccaagatagcctttagggggaaaacgtcacaagacatgaacgtctcccctggtagaaagaaaggctcctccccgaggtctcagaggccacacctgtaggca

SEQ ID NO: 1185 - DNA, 148 bp, Homo sapiens
gttccagaagagagtggaatggactgagtgcttgtgagaaacttcctaattgaggcttacctactaaagttctttacgttttaaagggttccattgcatcagccctcaaaatgtttccttccccagccctctttcttctatcatggtg

SEQ ID NO: 1186 - DNA, 134 bp, Homo sapiens
agctctgggcgggtcgatggatggggtcgagctgaggcccgggctggggagcggcagcagtcgctctgtccgacggttccgatggtccctccgcccgcctgcagccccacgtgttccctgggaattgctgggct

SEQ ID NO: 1187 - DNA, 142 bp, Homo sapiens
ccagggacctaggctccgcccacgcggagtctggatgcggcggcccctggggcacgcggcggcccctggggcacccggcgggagctgcatgctgcctagttgctgcttgcgttggccagacccacacagcccctggactggg

SEQ ID NO: 1188 - DNA, 157 bp, Homo sapiens
ggtgagggaagtggctgcagccagcacacctatgctgattggtgatggctcaagtgtgttaatgtgtgtgtgccggcgcccggcctcgcctccaccgctcctcactggcccattagcgaagcctgacctctgtcatcatcctccagcaaaacacttc

SEQ ID NO: 1189 - DNA, 141 bp, Homo sapiens
cccggtcctccggcctgagaacgcccgagtgaggagttggccgtagtgagagggaccgatcccttggggccgccggcggcgagagcccgagccgctcctcccaatggcgaagaagacgtacgacctgcttttcaagctgct

SEQ ID NO: 1190 - DNA, 144 bp, Homo sapiens
gtttgcaagtcgcctcgcgctcagtcgcgacggcggccgccgcaatagcggcattttcgggggcgcacgcgcactgcaccgtccgcggccgttcctaacctcaggcagcggctgtggcagtaagcccctcgggtgcgcacgcgc

SEQ ID NO: 1191 - DNA, 184 bp, Homo sapiens
gggaagaaaaaaaagacctgaacgtctgtgtgtagataggcaaataagaactgaaactgtttgccatccgcactttgaaagtcacactatgtgtcaagtttgtcaagtcgagtgaaagaaggagtgatgtgcttctccactttcctgaagaaccacgtagaaaatgtggcaaatatttaattta

SEQ ID NO: 1192 - DNA, 232 bp, Homo sapiens
ttcccacttccagccccacggggcgcgggcggaggagggtgcagcccggggatcctgcccaagtgcctcgcgccgaagctgaaaacctctccagggcagaccgaagcagccgaccctcgagacccagtcggagcctgcgatcactcgggcgaccctcgcctaccccgccgtaaaagccgcggcctttccacctaggtgctacgggacctacccccgtggcaaggaagagcaa

SEQ ID NO: 1193 - DNA, 1516 bp, Homo sapiens
gctccgcgctcttcaatgccagcgccaggcgctcaccctgcagagcgtcccgcctctcaaagaggggtgtgacccgcgagtttagataggaggttcctgccgtggggaacaccccgccgccctcggagctttttctgtggcgcagcttctccgcccgagccgcgcgcggagctgccgggggctccttagcacccgggcgccggggccctcgcccttccgcagccttcactccagccctctgctcccgcacgccatgaagtcgccgttctaccgctgccagaacaccacctctgtggaaaaaggcaactcggcggtgatgggcggggtgctcttcagcaccggcctcctgggcaacctgctggccctggggctgctggcgcgctcggggctggggtggtgctcgcggcgtccactgcgcccgctgccctcggtcttctacatgctggtgtgtggcctgacggtcaccgacttgctgggcaagtgcctcctaagcccggtggtgctggctgcctacgctcagaaccggagtctgcgggtgcttgcgcccgcattggacaactcgttgtgccaagccttcgccttcttcatgtccttctttgggctctcctcgacactgcaactcctggccatggcactggagtgctggctctccctagggcaccctttcttctaccgacggcacatcaccctgcgcctgggcgcactggtggccccggtggtgagcgccttctccctggctttctgcgcgctacctttcatgggcttcgggaagttcgtgcagtactgccccggcacctggtgctttatccagatggtccacgaggagggctcgctgtcggtgctggggtactctgtgctctactccagcctcatggcgctgctggtcctcgccaccgtgctgtgcaacctcggcgccatgcgcaacctctatgcgatgcaccggcggctgcagcggcacccgcgctcctgcaccagggactgtgccgagccgcgcgcggacgggagggaagcgtcccctcagcccctggaggagctggatcacctcctgctgctggcgctgatgaccgtgctcttcactatgtgttctctgcccgtaattgtgagtccccgggccccgaggcagcagggcactgagactgtccggccgcggatgcggggcgggaagggtggagcggatcgggatggacgcggcgccaggcgagctgcgccctgggccaggaaggtttgctgctgagttccccaaattggattccttccacagccccgagatataactcagtttgcggagcgaaatgagggaaagttagagaaaggaagggaaaggctgagcccggcggtgtctccctagcccagcaaaaccctctccatgtggcagaactccctcctctctgcttccttctggggagatctcgaggtcatttttgcgccttaggaggagcagaacttagtttctccttggcaacaggagtcttctacttcccgacggctgggtgatgttttattttgttagacctgc

SEQ ID NO: 1194 - DNA, 147 bp, Homo sapiens
taccacaagccaggcgcagccgggcctcgggagaaagccggaagcccgagagggtgtgggcgctccgggagccaaacgcggccgctcagccgccacgcgccggtggccccgcggggactcgcgttccggtgagagagccccggcgcg

SEQ ID NO: 1195 - DNA, 248 bp, Homo sapiens
tttattccatgggtggaagaggaagccaagttggctgagtgtgaagggaatggcgtcagtgtgacttcacgccacatcgtcccgaatgccagctccacactgcggtggcacgaacgcaggattgagagatgcagctggagtaaagagagaagcccatgtccctcagacgccacacaaaatgggggtaaccgcgagaacaaagcagggtacccaacggggtgtggcgggacacctgggcgcacgccgcc

SEQ ID NO: 1196 - DNA, 160 bp, Homo sapiens
ccgctgccgccagccccgccgactcgctccgggctgcgcgtgtgtggtggttatttatttattttctgagcacgcctcccggttcttcttttattcttgggggaagggggatggggaggagaagcgcacacacgagcacccaccccggcacggagaccca

SEQ ID NO: 1197 - DNA, 294 bp, Homo sapiens
aggggcgggcctggagggacgtgagtgcgcaggcgcgcggccagaggggcggagcgtaggaaagggcgcccgccctgtcctcgcttatttgcataaccaagactgcggaaggcgcaggactttaccctgggactgaggctgtgaagaccgcaagttggggcagatggcttccgactgcttgctgttgcgtccccgagtatttatatttccctcgaattttctccactgcgccataatgtaaacatataattgagtaccccatgtccatccccaacccttcacatacactacact

SEQ ID NO: 1198 - DNA, 216 bp, Homo sapiens
gggcccagtcagactggggtaggggcgacagcggcctacagcacctgccaggcgcaggccccgagagcgccacgaagagccctgctcgcctctgcaggtgcccggcgtccacacacacaccccctccgggggcaacccgggcccccaatcctggtccacttggcgcgtccccatctcggccctgcgctgctgcctcgggcgcccacttctctttcc

SEQ ID NO: 1199 - DNA, 124 bp, Homo sapiens
agttaagctagtgtaaatttctgattgtgctgcagttttccctttcatctgcgtgtttgttcatagaccaaactaaacggatatttcgagataaagggatgtggaggggtgttcggccctcccc

SEQ ID NO: 1200 - DNA, 142 bp, Homo sapiens
cagaaatcaccaggtggacggcagcgcagcctactgaggcggggcgacggcagcaggccgcagctctgggggtggcggcggctgtcctgagccccggaactgagagacggcaagccgctggcagtgcctccactcactcccg

SEQ ID NO: 1201 - DNA, 170 bp, Homo sapiens
gtctggtggcgtaggtgtgtgacaaagtatgagggcgcgccaagctctccagttccacatctgctgtcgagtccagcgcctgccacgctcccgtgcggggacccgcccaaaactccctggaagccaggcgattcagaccccgccaccgcgtccccagagactgggcggaa

SEQ ID NO: 1202 - DNA, 177 bp, Homo sapiens
cggcggttctcggagcacaaactctgcgcggacgacgaatgcagcagtgagtgcgctggaggggcggctggcctcggggcggctggccttggggtctccgccggccccgggggtctccgcggcggcgccgcctgggctgtgcggggacgggagttccgcagcccctggccggcccgg

SEQ ID NO: 1203 - DNA, 355 bp, Homo sapiens
caggagtaaacgctggctacaaatgcctttttatactggtatcaaagagccaggccaccagcgatgccacatccgccggtctacccccaccgacccgcgaagcaccctcacagctcacggccctccctccaggccggaaacgtctccgcccgcttccgcttcccgatgcagccgccactgcccgaagcaaagatggcgccaagtgcgcggcgccggcggggacgtcacagtggtcgcgcgcggtgacgccatcgcagcgcgccgggagtgtggcgttctgtgaagagttcggtgctaacctccctcacgcggcggtggctgccgggaccctagcaggtttcagctggagcggcgg

SEQ ID NO: 1204 - DNA, 147 bp, Homo sapiens
ccaggccatcctcatctccagcctgggttactgcagcgacctctaactctcctgcctcttttgtccctctgtggtctgttctcgtcccagcagccgagcccatgccagattcaattccttttttgctcggagccactcagtggcttc

SEQ ID NO: 1205 - DNA, 144 bp, Homo sapiens
aatatacaaagcagaagatctggaccaagccccaccgactccgatagacttgggagagcgaggggatccgcggtccgccccccttaaccacagtctgaggaagcttcagaagtgggtcctggccgtcccaggcgatgccactgg

SEQ ID NO: 1206 - DNA, 137 bp, Homo sapiens
cccgcgaccgctgcaggcgcctggacagctcctcctggggaccggggaaagcgctcttgggacccaggccgaatgctcccgtttgggcacagcctgggggccggggcgccccagacgctccagggtccccgcctgcc

SEQ ID NO: 1207 - DNA, 151 bp, Homo sapiens
ctctgaccagatagcggccgagaaacaatggttatctgctccactgacgccaggatgtcttctccgtgcccgatcccggagtacaaacagtgaaatgagaagccggtgagaaacgcgctggttaaaaacatctcgacgggagacgctggta

SEQ ID NO: 1208 - DNA, 157 bp, Homo sapiens
gttgctcaaaagcgccacccaaaggcgggaggagtgtaacggcattcagggaggatcgtttttgttaatttcagcaatccgaatgtaaaaaatgacagcgccacgcaagttgacggaggcttttgattgaattgactgattgcctcagctgcacctg

SEQ ID NO: 1209 - DNA, 156 bp, Homo sapiens
tgggtgtctggagcctgaaggatccttccagaagctagggctgctggcctggctcagccgaggggaagaggctgtgcttttcctctgagaaagatgacgttgcactttcatattgaggaaaccgcttgtggttggtggtggggactggtttttatt

SEQ ID NO: 1210 - DNA, 265 bp, Homo sapiens
atgaaaggtatgactcattacttccccgttttataagtaagcaaactgaggtcccatgaggttaaataattgcttagggttacccagctagtcttgggcagaaccaagggcttccattcaggtatttctgaccccaagccccaggcttttttcactgcacagcaggtatcagaagaggctgatgtgtgtttcacttcttcctagcacccacctaatgagagatgctcgcggtcagtgcaagggacagatattggcactgttagag

SEQ ID NO: 1211 - DNA, 146 bp, Homo sapiens
ggtcacgtgcccaaagtcacacagctagccagtagcaattttgaccctaggcagttgcacactgctaactagataaaaacgtactaacttcagtcttctaagaattgaggctataccagtagtttttaagtaaacacgtgcaagtg

SEQ ID NO: 1212 - DNA, 435 bp, Homo sapiens
tggctcactgaagcgtactacgccggatgtcttaagatatcgcgagacctttacctctggtttcttacacatcctttagaaactggaatttagcgagaatacattctttcatactgcctcctcccttgtttttctgtctcagagagatagtctgtcctaaatatcccatgtagcccaggccactgaattaaaacggagcgtattcgttctctgccccaccccgcaactcctgaaagcggcgcaactcaattacttgatccttatatgccccacgcgggactcatactacgtttcccgtgaacacgtgcagtccaaaccccgcccctgatatttatctcagtggacggtggccggaaaaggacaatggtttccatgtcagcggataaacgctctcccctcggctcccggacgcgacggaggtcgtagtagtagtga

SEQ ID NO: 1213 - DNA, 90 bp, Homo sapiens
cccgggagcgtccccggctacctggcgccgctcatcctgggtagggtcggccccctgaggctgcccggcatgagggagttgcacccctga

SEQ ID NO: 1214 - DNA, 144 bp, Homo sapiens
gcctgccgggtgggtccaggcccggaaggccaggcggggccctgtcggggcctgggcggggctggcggaggggccgggccgccccttccagcgagggcgggctgggcggtcgcctttaaaggcgcgggacccgccgcccgcgga

SEQ ID NO: 1215 - DNA, 105 bp, Homo sapiens
acttctgttgctgaaataaattcagtgaaatcgagctttgtctttcaaactgctagtcatgacccattaacgtgacagatatcagtttaataggttgtcaactga

SEQ ID NO: 1216 - DNA, 147 bp, Homo sapiens
ttatagcgaccgcggggagccaggcgctgaggagcgggcccgtggtgacggccacacgggtagggggctggcgaacagcggggttgtggttgaggctgggccaccaaagcggcgtttgacagtgctcaggccatcttcctcccgtcc

SEQ ID NO: 1217 - DNA, 148 bp, Homo sapiens
tggggcgccgagcggccaatggcacggcggcaggacgtgatgtcaggcgcggctgtagaaaaggcgcggaggcttgcgctggcgcggactgcagagccggggctgggctaggcgcgcgcttggagagcattgcgcgcggctgggcccg

SEQ ID NO: 1218 - DNA, 824 bp, Homo sapiens
gcaaatgttcacttctggtttccctacgtctgcctggaagtgggggcagtatggcagtatggaagacctagaaagggacaaggagagctacaataacagcggtctaaatatatcctaggatgaaaaggtgaggaaggaaacaggcgcagaagtgttataagaaaccaaagcggccttttgagaagggatgtaagagcaggcccctgagcagtttcacttcctctgggcgcccagcagagcggagccctggccttgcgggcatgagccccggggctgcgtttcctgagacctggccgcagcctccgcgggtggcaagcgggctggggagagccgagggccaaaggaagagaaaatcgcggggagtctctggccgggagagtccaggtagcgctcggcgggcagcagtgcgcaggcccctcggcttcaaccgccacaatgctgccagcagcgccaggcaaggggcttgggagcccggaccccgccccctgcggcccagcgcccccaggtgggtagtcgcgcattcggaggggcttgacgccgaggccgggctacggggctctgcggagaccacgggccatcgttagacaactgcactcgggcactgaggccagggcgtccctgagacagggcttctcctttttatcctgccgccaggcagcccagagggttcttctgtccctgacttctctgaggggcatctggacgccacgaggagggagcgcgctgggagttctggccagcgggctaccctcagtgtctgcaacttctgaggagctggaactttccccagcacccgggtcagggtcctgtagtttctaaaatca

SEQ ID NO: 1219 - DNA, 181 bp, Homo sapiens
tgcgctgaaaaggtgaccgacggggtggggctgcggctgcgacctagactcaggctagcggcccggattaagaacagcggggctacgagtcgggacactgccgggccggggctcacaacaaggaagtcactgaatctccagcgagctgcagctggactgtcggcccagccccgcccagagg

SEQ ID NO: 1220 - DNA, 150 bp, Homo sapiens
tccagtccttagactcacttcttctattcataattaattctgtgacacgtgttttctgccgaggacctctgacctcatggccacttcctgctgcaggtttagacggtggtttcctcccccgctcacatgccagccattcagttcagtggg

SEQ ID NO: 1221 - DNA, 176 bp, Homo sapiens
ctcccctaaggggctcttgacgtacagggagacttccagatatggtacacagatgtcacattgctagaacgtctctagacggcaacgaaacattaaagcctaacctgaggtaatccctcaccggcagtgaagctcctctgctaggcactgtcgtcccgtacactgcccaagctctg

SEQ ID NO: 1222 - DNA, 150 bp, Homo sapiens
ttttttctcttacccacagtctccgaaagtctggcgcttcgaagcagttggccctgacaccagggcaaacgcttaaccgcagcccattcttccctccggagggaggggagtagacttcgctggaagtaaggttgtctgtcaaagttagac

SEQ ID NO: 1223 - DNA, 441 bp, Homo sapiens
tccctgaaactagatcgtatccctctctctgggggtgggggaggcagtattcaccctgggcgcgcgtccactccccggatgttttctgtgcaatcgaggctctttccttccactgataccccgagttctcttttttggtctctagcaaaatccacttcctgttgtgactcaacacccccaaggggcaaggggtggatgcctgagtcgcaggggagcgggagcaaaagacgaaaaggttggggctgtaggcctcaactcagagggtatcaggaatagggaattggtcctgagctctggcttgctctgcaaaacatcatatcaaccccacttccaacctatagagtatgagaacccgggtttctgagcatcaagtagacgagcatcagaaagagatcatcagagagatgatccgtctcctggatcagggtttaaacatcccag

SEQ ID NO: 1224 - DNA, 172 bp, Homo sapiens
ctgcggagggaggaagacacggtctctcacgaaagggtctccagacagttccgctgctccgggagcagcccccggccccgcccccgcgtgcgcctggccccacccccaagcgctccatgaccagcctccacgtgcatccgccccagacaggccaggcctgggaggagccgaa

SEQ ID NO: 1225 - DNA, 255 bp, Homo sapiens
cgagtcccagccctggccctgttgggggccgaacaagcctggactgacaggcttgggctctcctctcttcacctgccatgactcctgctgccagggacaccaaggtacctttgccccctccgtggcaccctgagaaccagctgccccgggcagctgtcagtacggcccctgtcagtgccggaccttgcctggcccaggcctggctgcatccccctcactgcgcttgctttccaggtcctggggcctccagctcgg

SEQ ID NO: 1226 - DNA, 349 bp, Homo sapiens
cactgggcctcggaggcagaatacgggaagaaccgcgaaacaaccctaaaccaattctgaggaccacgaattcggattatccgggagttcttttgccatggcaccgcccccgccacttccgctaggaacccggaagttcctacccgacgccggaagtcccacggccttgcctcctcagattcctctctcacccccacgcagaggagagaacttgcttctggacccgggtgggtgccggctcggctctccttgtcttccagagcggtggcccggaagcacagtcctcccagacgccagcgccagaagctcggatcgcggctgcaccgggagagcgccgatctgggtgcga

SEQ ID NO: 1227 - DNA, 150 bp, Homo sapiens
gcgcgtgcgcacacttaaggccgtcgttcgaggggcggggcctggccctccacgccccgcccaagacctgaacttgcggaaccccggctggcagccagcatgtccccgcaccttttcatctgtccgctgacgctgccctggcagcttcag

SEQ ID NO: 1228 - DNA, 919 bp, Homo sapiens
ccaggtgagtcgcgccaggtggcagcgagcctttacctgccaggctgcccggcctctggagggtggccgtggcatacagctcctgcgagtgcttgctgtactgctcggacgcgtggaccaggcgcttggtgggcgacagggtggcgtacgtgccgatggtggagctcagctggtggatgggcgaggaggagatggtggactgcacggtggggggcgaggtcacgcggatcggggacaggccggccgaggacacgacgatgttgatgggcgagctggtgctgtaggacttggccaggcggctgggcgactgcttgggcgaggagccgcgcggcgcggcgtaggtggcgccctcgggggccgagccgccgcgctgcagcttggtgggcgaaccgccctggggcgcggccagcggggagcccccgcgcggcggcgcgggcagcgtggagctggagtagtagagcgcggcggcggcggcggcgggcggcgcgtcgggcaggtggaaggcgctgcccaggctgggcgcgaacggctcccgcggcggcggcggcggcggcggcgcgggctcgggccccgccaggtggccggcgcggctggtcgtgccctgtgcccgggagaggagagaacacgcgcacttagcgagggagaagcacacggcccacccggcccagcccggccccgagagcagaggcacaccggggatgccgcgggcgcccggcggctctgcgatcccagctgcgctcggggcagtacgcgaacctgcgccccgaactctcctggggcggatttcttgtcctgacactggcacaggccagctgactactggagggaagtcacgtttgacaaatgagacctgtgtttgcttacatgtagatgttatttcggaaatagcagaagcatcgcattagtcacataaagattt

SEQ ID NO: 1229 - DNA, 132 bp, Homo sapiens
ggggagggggtgctttctccacaggtgacggggccagggtcggcggaggcctgatgctggccggggatcgccggccccgccaggcgtccgctctcgcccgccgcctcacttgctcgagtctcgggtggtccg

SEQ ID NO: 1230 - DNA, 205 bp, Homo sapiens; identical to SEQ ID NO: 488

SEQ ID NO: 1231 - DNA, 982 bp, Homo sapiens
gggcgggggttgaggggaggaccgacggatacaggatctgtaaaagtcattctgaaattcaaggcgagggtaaagggaagataaaaacagagccgggggaggcatgaagaggcactgaagaagaggaaactgggagtctgacagcaaaattcaacggctccccagtccgcgcagggtctcttcccgggactcaagactcaactgggaccggcacgaaccacgacacacagggtcggggggacgcggagaggaaagaacaaagagtggcagtcggaatgagaaagcggtaaagagcgaaaaagaaaggaggcggccagtccgtaggcgtgactttaactcaggaagcacacagagcgcagattttgcggataactggcttgacaagcaggctccccttatttcccattatgggcacttctggggagcaaaaggccgtaaagggtttggactgtaccacgttcttcggtggggaggaactcgactcacccaggagctggaatggggggcagtgactgccgttggcgtctcagggacgctggccggggccctttcagagtccctctcccggtagattttgtagagccgggggcctaggacgcagctcagcagcttcgccatggccccggctcgggccgctgctcttccagcagcaggtccccctgccggccccgccctccctgcctctgaggtgttgtgtgcccttgacgtcagcccgtaccggctccgcctccgggcgagttgcgacattttcagtgcttcctgagaagagtttcgcgcagttggagctacgggtacagcagtggtccgaaactagtggaagaccactagaacgcggagaatcagaaaattaccgggcatggttcaataatttttttctgtctcattattggcagactctagagcgacagcggaaacgaggggtgagattaggagtacttgataagagtaaccgaaaacataaggtgtctaggaatgtatctag

SEQ ID NO: 1232 - DNA, 144 bp, Homo sapiens
gatccagctggctcagcgcctggcggggaatgagcaggtgacccgggaccgggcggtgaggaagctccggaaatacatcgtcgccaggactcagcgggccgcaggttggcgggggtgtgggcggctggcgtctcgggggccggc

SEQ ID NO: 1233 - DNA, 155 bp, Homo sapiens
ggcatgaaactttaaacattttccccaaaacctgacccaattcagatacaaaactactgctcaaatagtagaagccgctaatcttgtctttggttttaatttacatatttttctgaatatcgaaatccgttcctataacctaaacaaggcgaatc

SEQ ID NO: 1234 - DNA, 143 bp, Homo sapiens
actcgggggcaggcattcctcaaacactttctgcttcctatgctctgaagtctccctcccagcctcggtggaggagggcagaggcaggcacgctcacatttcctagccttccgctcgtctctcaaggccaatcctttcttgaa

SEQ ID NO: 1235 - DNA, 144 bp, Homo sapiens
cccgccggaccatcgttcagttttattcacagaaacggtgccttcaagaaatcaaagcataagagccttcggaagcagcatgtaagtgcaacgtaactttcccgagtttggtgacgatgaatcgatgaatcgtagactgcaggc

SEQ ID NO: 1236 - DNA, 187 bp, Homo sapiens
tgccggccggtgaccggtcccgaggctgcccgggtgactctgccgccgccgccgcgtcagcggcctcggccccgcccccggctcctcattggagggcgcgctcccctcgtgaccaccggcacctcacgtttctgaagtgtgtttactacactggctcggaggggtaatctgctcgcgcttcggtcgc

SEQ ID NO: 1237 - DNA, 141 bp, Homo sapiens
tgactccgttatgggcatacctgcctctcaaatgagtgcttgcgagcttttttcctctctgtcgttttaaaggggtcggtggaaaagaggtggttactcgctagggtctcgctttagagggctgctgaggggaggcgattt

SEQ ID NO: 1238 - DNA, 34 bp, Homo sapiens
agggagaagtgtaagaagacacaggcgcccggga

SEQ ID NO: 1239 - DNA, 277 bp, Homo sapiens
gaggttggcgttgcgcaaagctttgatggatgcgctctgcggggttgcagaagtgtcccgacagctgcaaaagtttgcgcagattagagtgtagacaaagatgagccggtgcatttgggatcagcgactagagacagcgtcgctccaagaaaaagccgggttctgctcccgggaccgacgccgcgccgccctgcgctctcgccgcctgcgctcgccctgcgctggcccgggtcgctgtgctaatcgccgagctctccccaaacttcctgcatgctga

SEQ ID NO: 1240 - DNA, 147 bp, Homo sapiens
agggcattccgcgggtacccgcggagcaggacggccacccacgccggggcccctggggctccacccaggacgcacacccggagagacccaatgactgcgtttcgcacctgggcgcaagctggttactgggcacgcgctgacaaccca

SEQ ID NO: 1241 - DNA, 150 bp, Homo sapiens
aattccctctcccggggccactcacacttttagaaaagagccgcggcgccgagaaagtgggttggttcccttcctccttcggactgaagcggcagctgcggaaggctccggcgcggtactgaggaagaagcggtgctcgtgtcgctaaac

SEQ ID NO: 1242 - DNA, 178 bp, Homo sapiens
ggtgggtggtgattggctgaggccggttgccggagcctggagcctgcgtcttttgtctgccttgctcctgcgaaggagcgggagacggctgcgcgccccaagcgggccaatcaggagacagccggcgccggccggtaaggcggcgattggtcagagcccagttactaagcgggacaaa

SEQ ID NO: 1243 - DNA, 155 bp, Homo sapiens
gttgcaccgggagtgccgcggcaacgccgagccacctcccaactctgcccctcgaattcccccccttgcggcccctcggcgcgatcccaggcgaggcaatgtcctgagaacgtgtggggcttagcaaacaaagtgtctgtgcaataaagtgaaac

SEQ ID NO: 1244 - DNA, 134 bp, Homo sapiens
gagtacataaatgcataagccaatgaatgaatacgtgaatgaatagattaataaatgaatgaagaagaatcacggcagaactcctaacccctagcacgcctgcctaggggaacaggaataagtcaggaaagaaa

SEQ ID NO: 1245 - DNA, 144 bp, Homo sapiens
aggcctgggaacctgggaaagtgcactgtctcgcctcctggcctcgcggtggttccgcagtcaccaggacccgaaattcacagctgtgcgtcctaagcttgcagctccacaaacgataaaatcagacttggccctgcagtgccg

SEQ ID NO: 1246 - DNA, 145 bp, Homo sapiens
acgggcccgcccagccccacctggagagccgcaggctccaaagtcttccccattctcggggaccaggttccggggtcgcgctgagggcccctgaaccctcttggactgcctggcagcggcttcttcctaccaccacggctcacca

SEQ ID NO: 1247 - DNA, 1039 bp, Homo sapiens
ggctcctcctccccgttcctgtctcccgcctcagggcccccctcactggctgcctgctgcacggccagggccagggcgctgatccacgcagtgtcctgggcgcttcggtcaaagtgctcggcaaggtcagggaaggcaaggcccagcgagcgcagcagcccgtaggacagcccgtttatcgcgaaggctgcggccgccaccacccagccccagcccccatccgggggtccggcgggctggggggtcatcgccgtctgcggggtggggaaacatctgtgagagaagcctccacgcctgtgcttccgctggggagctggcatccctgagatccagcctctggctgctcgcccggggtgggcccgtcactccgagcgcgatggcgcggggcggagggagccggagcctggcctagggctggaactcccgggtccgcgcgaggtacggggacggggacagccagatccccaggcccgaggttccccgtcccacgcacactccttcccccttacccgacctctccgggcggtgcggggaggggaagggtgaggaagggctgggcccggctttctctctgcttcccaggcgggcgggggccccgaaggggagcgagggcagcgatggagcccaacttggacgggctctctcggtaaacagagatcaccacaggggcctgagccacctgggacgcggggtgtacggagggcgggggcgagctgaaacagccaatccggcaagccgcgcgtgaggccagacgccagtcccacggggattgaattatgtacacacacaacccccaggcccgggggaggggggagcggcgagaaatgaatgcagaggggccctgccctactcacacgcatgcacctgccgcctgctgcgcgcaggggagacacgtggattgcaaaccccagcgagcccagggtccaccgccaacgcgtggaaatagggatggtccccaaaacctgaggggatgagtagttttgttctcaggaacgttgccgaggaccaggtaaatctcggatatcaatcagatcacaga

SEQ ID NO: 1248 - DNA, 143 bp, Homo sapiens
ccgcggcggtaccgagcggagatgccacctggtggcagctccaggcaccgctcccggagcagctgaccccggcggccgaacagtaaacacgctgtcagaactgctcaacagcccacgcggtcctcatttgaggctgctggccc

SEQ ID NO: 1249 - DNA, 291 bp, Homo sapiens
gagaagagggaaaaaatttggctaaaaaaaaagttgctactcctggcagccctggtttgtcaaaaggggatgtcaagcgctttacaatacctgggattgatgaggcgggcgggccaatgagctgcgcgcggcgcctcggcgcgccctccgttggcgcggcggctgagggcggggggaatgcgggcgcaccaatgggcgccagcgtcggcagcacgtgacacctcccccctgctcccattcatcaagggggggacggtgtcgtcctttcaattcatttatctgcaggaatga

SEQ ID NO: 1250 - DNA, 283 bp, Homo sapiens
gagaaattatttttggcaatacggtaacttaccaccttgtgcacacaagcactgcccatgtgcagggacgttttacttgtcaagatttacctcggaagagcatggtgtgtgcgcagcacaaaggcggcaggtgcggatggcttttttctcagtgatagggcatgtcaattctcatttcctatatgctgaggagcacaaagggaagcagccggcattgccctctggggccaaccagctccttccttcccctcgcatcttggagatatgccatcctgcccaagta

SEQ ID NO: 1251 - DNA, 315 bp, Homo sapiens
gcccgcagggactaacaccacttggacccagggactccagcttcactccgctttgtgcactgggtggggcggtcgcggtgacgtttcaggcaacgcctctgctgtcagccaataaggagcgggagacgcgtcgggcctgcgctcaatgggccgcgctggtcccgccccactgtgatcgtgagactgcagacccgctaataaaatccaccccaacaatcgctgtgtgccgctttagtgcgctcgccgtcggctctacctgcgtgctttagctccttctcgcctgatccttctgtctctcccaaccccggacacccg

SEQ ID NO: 1252 - DNA, 526 bp, Homo sapiens
tgtgggagagagagcgttttactctcgtggaggggcccgaatgaaaaaggcatcaccgtggaagaacttgagctttcagtcctgataggtcatggatataaatggatggcagctgctagcacagtgatttatgagtgatgctcccagccaaaggaagtcaggcacattctagaactgcagaccgctgtgtacagggcatctcagtatatttagcaaaatgagattgcaaaccacagaaaaaagggctgagtgggtggagaggaagaacattctctggccagaaacttgctgaactttgaggccagggaccggaggctttgcagaggtggggagagacgttctttggcttgtccgacagaaataaatcaccactgaggagatataccaaaggccaattatatggagtgttttcttggaaaatcatctcccagacaggccctgtaaatcatccccagcattggcagacattcagatctgcctggtggggcgggtggcatgccagtgcaccccagtgtcaggtagagga

SEQ ID NO: 1253 - DNA, 206 bp, Homo sapiens
cctccgcgcggcgcggactcattacggctgcagccaatttcatgccagcgccgagcactggctgggccgggagtggggtcgggggtgcgtgcgggtgcgatccgggcctgcagggtgcggagcgggggcgtcccggggcgagggcagcgggccggttcccgcccgcccggggccgcggcttccgcatttctgcaccatccacctgc

SEQ ID NO: 1254 - DNA, 144 bp, Homo sapiens
ccttcgacctctcaagaccaggcaggggcgcccttccgcaagctcccagctctagccggtgcctctggccccgcgcgcattaggtcgctgccagaaaattacccgggcaacgacaccgccggagtcccggatgtggttgctagg

SEQ ID NO: 1255 - DNA, 137 bp, Homo sapiens
ggaaaatgagaggaggggaaaggagatgtggctgaaaggaacaggggaggggcagcaacctgggcgatgggcggatgcctgcccgcacccacagtgctgctgtagctggtctgagttctagggatgtctttaattgg

SEQ ID NO: 1256 - DNA, 145 bp, Homo sapiens
gggttaacttaacgtagatgtttaactcgtatacagatgaacattccagttgatcactctgaagctttttggctaaagcgtttgggtttagagcttccattactcattcgccttgcccaaggcctcagcaaccgacgttcgaaag

SEQ ID NO: 1257 - DNA, 162 bp, Homo sapiens
gcagatgagaagggaggaaaataaaagaaagtggagactgcagaacagactccgctgtggctgactgtgccggccgacgctccagctgaggggctgggttggatttttttttttctcccatcctctcgctctctcttttaaagcgacaccagctctctctcc

SEQ ID NO: 1258 - DNA, 130 bp, Homo sapiens
ggaatccttcacggccgccagagggcgcaaggagctgcggctggaagtactcggagggccggcggaggaggcgcgcggagcctgtaactcgcagcgcgcgctggaggtgggcgcggggcggtgcggtgcg

SEQ ID NO: 1259 - DNA, 214 bp, Homo sapiens
aaactggaggagtcccgctcgaagctaggtgaggaactgaactgccccgggctgagtgctgtggaaggggccgaggaggcgctgccgccggagcaagtgggcgttcatctaacctggggtctggctcgggggctgaaagcggtttcaaagagaaccgggaacaaggggcagcgagagcacgagctccaagaatgggttgaattaagcttgagcg

SEQ ID NO: 1260 - DNA, 111 bp, Homo sapiens
ccggcgagaccgaaagagccccgtatccgccgcgacagcctttggcggtgggcagtgggcaggctcagctcgaaggctcagggaggaaggatcccgaactgagatccttga

SEQ ID NO: 1261 - DNA, 180 bp, Homo sapiens
ccgcctagacagtcttaagtctgttttgacgttaatgctggtccgaattccaaagggaggaggagggtctagtgaggcgggtcccacccggcctttcccatcagagcccgaactcgcggttcaggttccctctaggacgcccttggccgagaggaggcctccaatggctggctggggggc

SEQ ID NO: 1262 - DNA, 138 bp, Homo sapiens
cccgggtgattgcaatgcgcagccggtcgcgaaccctaaaacgcttcgagccattcccgcaggctggcgttgcgttctgggagatgtgggacgcagctcccctggcctccggtctcccccgtcctgcccgctgtgcgc

SEQ ID NO: 1263 - DNA, 130 bp, Homo sapiens; identical to SEQ ID NO: 284

SEQ ID NO: 1264 - DNA, 157 bp, Homo sapiens
tgctcgacaggcctgcgtgctgggtgtcttcagatgaagggcgacgaaatcctgagggcaatgagcctccgtgcgcacgcgcgctggtgacacctcctccctctcccagggaagcgcggccaggggaggggcgtttcttgccgcaggacggttgctg

SEQ ID NO: 1265 - DNA, 151 bp, Homo sapiens
ctcgcttcaagctgcagtgaatgggccacgtcccgagccctggtccggctcccaggaggccacacacactccgtgcgaagctcaccgactccggacgccgggacaggagcagctgcacccgcacctcggccataacgcgactctggagtcg

SEQ ID NO: 1266 - DNA, 203 bp, Homo sapiens
cggcggctgggctgggcggaggacgggcagccgaggtccggcctccagcggcgcgcaccggcctcgggccctcctgggcgctggcgggctcgctcctccataaataaaatacagggcgtcgactttcgcaagtgaccccgaggagcctttctaagcggactccacgtcagcccgacgaccgggcgcccgccccgtccggcccc

SEQ ID NO: 1267 - DNA, 151 bp, Homo sapiens
ggcggcctcggcgtcggcattttataaaatgagagcggggagggcggccgaagacgagtgtgcggagccttaggccccccgctcgggtccgcttttcgtatattcgggtaggatcggatgtggtgtcttccgttgaagtccctcggctcca

SEQ ID NO: 1268 - DNA, 136 bp, Homo sapiens
gatacccgggccaacgagcggggagtgctgcgctgtgcccgccgtccttgcccgccgcctgcagccgccgcggccgggcggtttataaccagcccagccgacccgccgcggggcttttccgtgacgtcagcgcccc

SEQ ID NO: 1269 - DNA, 381 bp, Homo sapiens
cgctgagggcccgccaaccgccagcggttgtcagtggcctagaggcagcggacgcaaacacggggagaggtgcaatcgtctcaagtgactcggcgggcggggcccacaaccggaagcgggtgggcgaccttcacccacgtgcgctgcggcttcgttcgccagcatccaagatggcggcagggcggggcccaaggcgcggcgcgaattgtgacgcaggcgtccggcgtgctccgtgcgcaagcgctttcggcggcgattaggtggtttccggttccgctatcttctttttcttcagcgaggcggccgagctggttggtggcggcggtcgtgcgggttcgcgccgggccgagagcgggttgggggctgcgggaggctgcaggg

SEQ ID NO: 1270 - DNA, 144 bp, Homo sapiens
gcaggtcacagggccacacaggctgggcctcctggagcagaggacacagagcagtgaagtcgagacctggaaactccggcggcagcgagagacaaaggcccagccacatcccggaagccgccctgtccgctccagctttgtgcc

SEQ ID NO: 1271 - DNA, 278 bp, Homo sapiens
agtacacaaataaatttggaatcctcttacgagagtaggtctgattgtaattctatgaattagtttttttagcttttaaaaggtaagacctttttagcatggatacagtatggtgaataacatttaatccttagctttatttatgcagtaaactttaaacagttgaaaattgggttcctgctctttctgcggcaggttctgttttctaacataggcaaaatgttaatgtaatagaggaaagtctcgtttttaagtttcaaatgtgttttgaaacaaga

SEQ ID NO: 1272 - DNA, 129 bp, Homo sapiens
ctgctgcgcggaagaatgaagctgcacgcaacagcctttcccgggacccgggataggccctggccaggcgctccggcggcggcagccgcaacgcccccaacctttgaaagcgcttctctgccctcagac

SEQ ID NO: 1273 - DNA, 252 bp, Homo sapiens
gctcctgcctgctattctccaaggagccggctgctggaagactgctccgaacctcatccccttggtgctcctgatgcgggcgatcctccgactgctcggcgccaaccacaacatgctacccaccgtgagagagcaggacgcgggctgctctagtcaggacttatcgtctatcatactgattgacgaaaccaagagtgagcagaaaaaataaacacgaacagaggctgcagtgtatgggccagtcagctggga

SEQ ID NO: 1274 - DNA, 142 bp, Homo sapiens
cagctcttaggctgggaaccccggagtccggccgtccctcgggggcctcgagcgtctccacatccttgtcgcacagcgctgcgatcagcgcggacttccccaagcccggaggccccaggaacaaggcggtcacgtcaccctg

SEQ ID NO: 1275 - DNA, 141 bp, Homo sapiens
gccaccattccgctggcacaatgtagtgccctgccccgggcctcagtttccccatctgtggaactgagtgtggcctcgacgtcaaaaatgtggactctggtccggtcgcggtggctcacgcctgtaagtaatcccagcact

SEQ ID NO: 1276 - DNA, 221 bp, Homo sapiens
aaaccttctgtgggagtcgggcaggctcggccccaccctcaaggctgtgccctttcctcccagactggttatgcaagagcaggcatgagtgtggtttttgtgggtgcatgcgcggcaggcctggggcctggccgcctgctgcctcacctgcaaggaggggcctcccagaaactcccttccccaatgcccagccgccccaccttgccagacttagctgacca

SEQ ID NO: 1277 - DNA, 152 bp, Homo sapiens; identical to SEQ ID NO: 560

SEQ ID NO: 1278 - DNA, 136 bp, Homo sapiens
gcgcgtagtccgctcggacggccctggggagcgtccccggacggaagcagtgcgggcgggactgtggggcggcccgggccctttcgagcccctgccgggcaccgctggcgacgttggccccgggacccctggagcc

SEQ ID NO: 1279 - DNA, 790 bp, Homo sapiens
tcacaaaggagatgggacaggctacggtgccaaagcctagagaccactcggaggccactcaacaaaatccagggtcttttaggtaaggtaggaagaagccgcccgctacccctgccaccttcgcaacaggcttacttccaaaactgagttcgttttgccttcatcagaacttggccctcctcggccagcaacctggggagaaggcgagcctgaggcggggggcgtagggtagccccctagcgaaggggagaagagcgagggcgcggccgaggtcgcttagccagaaagcctgggagtccaggcttgggtttgtctcctttgtggccaagagcgcctcccgggctctcggggcgtcctcccctgcccgccagagccggggcgccggcactgggccctgaggcctggcgcgcgcgcagatggcgttggcgcgagcgcggactggagacgcgctcattgacgtggcaccgtagccccgtgcggcgcaggcctggcccaggcggggtgtggttccgtgggccgcagcggcctggtgggcgaaggtacaattgcggatagcctctaatactcacggccctgccgcaggacaatatgttggcagcatgctaattgctttaacctagtttcagacccaccgaggggttccccgcgcgccgcgggtgccatggacctcgtccaagagcaattaaagcgaggccgcgagcccgaccccgcagcgcggcctggccagacacgcggagattctgggtcgcaaggctcccgggagccccttggccgtggaccctctcacccc

SEQ ID NO: 1280 - DNA, 153 bp, Homo sapiens
agagtcacaaacccaagcaaagctaatagaagccgagtgtggataaatgctgtaatcaaggttcaaacaattcaatgaaacaggaaggaagtagttcattctgcccagacagaccaggagcgatctttgagtggaggctggacgagaatctgg

SEQ ID NO: 1281 - DNA, 146 bp, Homo sapiens; identical to SEQ ID NO: 98

SEQ ID NO: 1282 - DNA, 138 bp, Homo sapiens
tagtatagaggaaacaaaggtaggctgggatctggagatctgggctttatttgccgttctacttcagcaacaaaaattcgccgctttggggaagacatgacctttctctggggttgaaccagaagacttcccaggact

SEQ ID NO: 1283 - DNA, 150 bp, Homo sapiens
gctcccgagcccaagctgggcatgaatattcatcgggggcgtggccccgccagcgcgcagggctccaagcagctgcgactagcggaaagcgcgcgccagctgcacgcagggaaacagttctcattttgtgtgctcggctgactgcacgtc

SEQ ID NO: 1284 - DNA, 140 bp, Homo sapiens
cccaaggtacggccctgacccacatcacagggtggtcctgagaatgaaatggcacaacaaatgggaacgatgctgcagacccgggaggactctgaccctgcgggcttcaggaagcatctcaccaaaccaccacacaaacg

SEQ ID NO: 1285 - DNA, 141 bp, Homo sapiens
tcatgtactccgcacatcaactctatgattatatgtactattattatctcattttactactgtggaaactgagatacgaaacttgcggagtgaggatttgaacctaggtcatactcttggccagccagagacaccctaagc

SEQ ID NO: 1286 - DNA, 145 bp, Homo sapiens
cggggccgctccgtaccgctgctccctgtgcggggccggctgtcccagcctggcctccatgcaggcgcacatgcgcggtcactcgcccagccaactcccgcccggatggaccatccgctccaccttcctctactcctcctcgagg

SEQ ID NO: 1287 - DNA, 135 bp, Homo sapiens
ttgtaccataacctggaatgccagagaaattgtaaaacaaaagctgtgggtgtctgcaacactgccgcaacctcagtggccagccgcagaaagagaaagagccttgaaggaagttagattttggtcacaggtaac

SEQ ID NO: 1288 - DNA, 316 bp, Homo sapiens
ctttccagtaggctctgcagtgatgaaggggatcaggggaagcaaagtgaccctactggaaccaaacggatatttccgtggaggtatcctaaggggatgggtgttgcagagcaaagctgtaagctgccaactctgacccctggggaagccttgcctccaggttccccgaggttccccgtggtggttttgcacaggctatttaggcacatctcggccgccgtggcggggcacggctcagctgttgcggggcggggccttcgcagagcatggcggcgggcgagcttgagggtggcaaacccctgagcgggctgctgaa

SEQ ID NO: 1289 - DNA, 147 bp, Homo sapiens
gagtgcggctcattgccgccacacagtgctcatcccagctggagaaccaggggttcagacgcctccggaatggagaacgggcgtacaggagcctccgcatcaggagctgggccgggggctgtggcagcgtttgaccccccgcgctga

SEQ ID NO: 1290 - DNA, 157 bp, Homo sapiens
cgcgcctgcgcacggggccgttttcgtctcgctgtgttgtccgcgagtctttgctgtgaagtgcgtctgaacagctcgcttgtgcccgacctactttttccttaaggcccactcgcggaaactagtttcttgtggggttatcgattctgtaccccga

SEQ ID NO: 1291 - DNA, 171 bp, Homo sapiens
ggcagcaggcggcccgggctgagcctagggggcaggcgcctgcgggcagcggcggtacctgcggaagacgaggatgtcctggtagcgcgagcgccggtggtggagcagctgctccacctgcagtgacagggcctggccgggccacaggctgcaggtctcgcggaaccagcc

SEQ ID NO: 1292 - DNA, 151 bp, Homo sapiens
ccctcaccccactccaagaaaatgcaattaacttttccatttcaagtaaataattctgtcacgtgctttctactctttaccgattttgctttaggtgctcatctgaaaatatgcttcctgttgactttttaaaagttccttgtagagttct

SEQ ID NO: 1293 - DNA, 211 bp, Homo sapiens
gtgggtctcccagcccgccacatcccagggctgtacgcgcggactagcggagctaggggaaggtgccagggtggccgccgcctcagtagcacgcggacggctggaaagtcagcccccgtttccgcctcacccaggattgctccactcggggcctttccgcatcccagccaccactccattccgaggcgcgatcagctctgaccagtcttcc

SEQ ID NO: 1294 - DNA, 218 bp, Homo sapiens
aaccagtcctcgcggccggcttcccacaatgcacagcgcgccgctcgtcacatcccttcgcggccccgagcgtccggcctccgcgcccgtgccgcccggcgccccggccttgaccccgggcccgcgccctacccgttgacgccggccgctctgcgcccaggcaccagcccgcaccccggacgcgaggtctgacccatgaccccggggacgcccagagc

SEQ ID NO: 1295 - DNA, 150 bp, Homo sapiens
cccgcccggggcgcgcgtcagaacgcacagtctcccagcccaggtccggaggctcaggcagcccaacgccggcaccgcggagctgcagcgcgctcagcaccgccccgcccaccccgacgccgcccctctgcacccgctcaccaccagtcc

SEQ ID NO: 1296 - DNA, 148 bp, Homo sapiens
cccgagccgctggcaggagtgcccttcccccttcagtctggagctcagagtttgtgcgtccctgggggtgaaggggcgtccacgctgtgatggtcgcctctgctcagtcctgggggccaagccagggtcggggtgatcgagcaggccc

SEQ ID NO: 1297 - DNA, 244 bp, Homo sapiens
ggctgataactggtgggagggcagaacgtgccacagtaaagagagttggcagtggtggtatctgaaattttattggacctacagaaatcttccaagtactgtgaaaatgtctgatggtgttatcaacttatgcagtaatctagtgaaatataccatcttgctactctatgtaagaggcaattgtgaaactgcatttccctttgtcatctgtttgcgcagtttatgtctgggcaaggacacaatt

SEQ ID NO: 1298 - DNA, 160 bp, Homo sapiens
ttccgattgtgtgcgctttatttttcaattcttcctagtcccggttttgcatttctaatgacagtgaactgacaaagcgtgaaagtggtctaaggagcaaaacaaagccagcaagcctgcttctggtgtgccaagattaatcaatattccagaaacctcg

SEQ ID NO: 1299 - DNA, 147 bp, Homo sapiens
aagcaggcttctgctatgtccaggtggccgaggggcagcgggtcgtgggggttcttgaagtagcagaggcagcagcggcgcccgtccaacacgaaccgacggctgcggtagccacgcagtcgcgctggttcccgcgcggtacccgcc

SEQ ID NO: 1300 - DNA, 143 bp, Homo sapiens
cagagcacggaaccgctccgcgggggagtctcctttcttcctagctctccgttgggaatgaaataatcccgcggccgccaggaggccggctaaggatgcggcccggagcgcgccggactgggatcccgagctgcagcgcggca

SEQ ID NO: 1301 - DNA, 222 bp, Homo sapiens
cttcctggctctccaggcaagaaacgagagtccctcgcagcctaggccagctctccctcgccacgccccgcgggggctcccgtgacagaccaagtctggcgctttcccagcgtcgcagctggaccgagagaggagcggccgttctgcaaaaggaagcaagtcgccaatctcgccggaaccgcgccccggctcctccggccgggcgagctccggggcttccag

SEQ ID NO: 1302 - DNA, 138 bp, Homo sapiens
cgttcctctccattgcccctttgttggcctccagggctgcagttgggggagcctcacgccacctgaagtttttggaggctggagaaaaatgttccgcgacggtcgagttcaggggtgaattgggttgcacctgggtag

SEQ ID NO: 1303 - DNA, 126 bp, Homo sapiens
tccgggcaccaggcaacacctaggccgttcccttcagacagccccgggccagcggccccctcgggaaatgtccagcggccgcagaaggggcagcgccccctggcacagcttctcccggttcttcgc

SEQ ID NO: 1304 - DNA, 163 bp, Homo sapiens
tagggggccctgaagcggccgactgggggcccggctctcggcggaacgagggctgcgcgccccgagcctcgagtccgcgctcctactccagctgggctcgcacggctgctgcaccttcgcgcctcctccctgtgcctgcagccgtctgaaggggacccggacg

SEQ ID NO: 1305 - DNA, 138 bp, Homo sapiens
attggagaggatccgggagtgacagacgccgtttttctcctgaacttgctggggggactgttgagtttgcgaatggggcgtctgacagctggagggggtggaaggaaggtctggggatgctggttctgtttgccattt

SEQ ID NO: 1306 - DNA, 148 bp, Homo sapiens
atagcactgaggtggtttcatgaaagaggaagcagcaaggctgggccttgaagaacgtgaaggagtcacccagctagagagggcaggagggtgttccacgaagtacaaacatcatgaacagaaagtcaaagagtgaaagtgaagggag

SEQ ID NO: 1307 - DNA, 138 bp, Homo sapiens
ggccttgatcgttttccaataaccgactgaactgagggcgtgaccaaacgacaagaaccggaggagaggacccggagaacggagcagcatcccgccgcccgcctccaggaaagcccgaggcactgtagcaggagggtc

SEQ ID NO: 1308 - DNA, 148 bp, Homo sapiens
ccaggattcaaactcgcggctccagaggccacaggcttaaccacggaatcctagcccgcccgcacatccctccatcgcgggagcgacctatctcatccgtagacaccttccgctgcacccagccgcagctggtcaggcgggcggagga

SEQ ID NO: 1309 - DNA, 130 bp, Homo sapiens
cggctctgggcccagcacgctgctggcagactgctgcggtaggcagtttggcatttcaagggccaccctcctcacctcctagtcactgagacagcaacgccagaggtactgggaaaaagcctgaactgta

SEQ ID NO: 1310 - DNA, 139 bp, Homo sapiens
ggcggcggcggcggcagcagcagcagcagcaggaggtgggggcctctgccaggtaccgggcggggcaggcacggaggtgcccaggttcccgcggaggccacctcttccctggagtgcgtgagagaggggaagggaggaa

SEQ ID NO: 1311 - DNA, 127 bp, Homo sapiens
gggtcctgggcgatgggggtggagccgccatggagggcggggctacatgatgaaggggcgtggccagagacggaggctgcgccggatcccacgttccactcaccgaggttgggggtcttcacggtgt

SEQ ID NO: 1312 - DNA, 134 bp, Homo sapiens
gggctcggctttcttggttcaggtttcctcagcgccaactacgtactaggcgcccccagcagaaacggccaccgcgggtcccagctcggcacgtggagcgagcttaccaagtcttcactgttgttacctgcatt

SEQ ID NO: 1313 - DNA, 240 bp, Homo sapiens
tatcgcctggattgctgcaggcaccccagtctcctttcctaaagaggtctctttaaacagaattttgagagattgcgttttagttatgcgggccagggagaagtggatgctcgccgcgccaggcacgtccacaggaacgcagccccgagtcaccgtgtccttcgtcctttacccgcctgtgtcaagcctcccaaaatgacccgcagttcagctcgtccttcgccgtgaacgtccctttgc

SEQ ID NO: 1314 - DNA, 143 bp, Homo sapiens
ggcgaggggttcccgacagggctccggccggcggaagtggcgcccgcaggtacagacaggatgcaggggttccgctgcccgccccgcccggcccggccctgaacagaagaggactgagccccggctacgccacggcgactcgg

SEQ ID NO: 1315 - DNA, 136 bp, Homo sapiens
gcgctcggaggtggtacggaccaaccctacggtcatagattttccgagtgaagcttttgactaagtctcaggaaagcgttagctacagaattctagattcaaaagaaatccaccaaaaaacgctgtggaggactgg

SEQ ID NO: 1316 - DNA, 140 bp, Homo sapiens
ccctacctccagtggcagaggggtcccatccctgaccccagggtttcctccccaaggaagggcccccgtaccctaggctgctccatcatgcgaccctgagccagtgtccagccagctctggcctcagttcctccatccag

SEQ ID NO: 1317 - DNA, 247 bp, Homo sapiens
ctgtgccatcctcttggggaacaggaggatatgtccgtagaagacttcgtggactggggaaagccacgccgggatcgggacgccggagagggtcgcccctccctaggctttttcccgtcgcggcgcccacgtgaccgagagcaggccttcaccagcccgcccctttcggccgctgctgcccacttcccgctcggggtaagtaaaccgccgttttccgcaccgccccaaccccgcccttctcctttcc

SEQ ID NO: 1318 - DNA, 139 bp, Homo sapiens
gtccgctactcccgggtcgggcgcggagaggcgagtccccgagtgggtggggccggatgtgcaggccccgcccggcgccaggttccgggctcgggtcaccgcagcacgtccaggccgccgcgggtgccgctggggccgc

SEQ ID NO: 1319 - DNA, 163 bp, Homo sapiens
gaggctgagcggcagcaatggaaacaggagggggtcgtcggttcaggtgagaggcgcacctaccgggccttaggctatcgtgggaactgtgaggaaaagggatggcagcgactgattctcatccctcccttcatttttccctaacacagtctagctgattcct

SEQ ID NO: 1320 - DNA, 295 bp, Homo sapiens; identical to SEQ ID NO: 375

SEQ ID NO: 1321 - DNA, 623 bp, Homo sapiens; identical to SEQ ID NO: 39

SEQ ID NO: 1322 - DNA, 141 bp, Homo sapiens
tttgccctgtgacacaggggaagctggtggttctgaactcaaagttttcgaatcttatctcaggagagggaagagctgtctcttctgagctttatttataccacccggggggaaggactctggcccaggaggaagaggtca

SEQ ID NO: 1323 - DNA, 137 bp, Homo sapiens
gaagatgagggaggggtggacttcttgggatgggcggaaacacttacaactagggaggaagccaggctgcggcggacccagctgaccaaaggaactacagaagaggacgaagaaagcgagggggaaagggcgagggt

SEQ ID NO: 1324 - DNA, 415 bp, Homo sapiens; identical to SEQ ID NO: 589

SEQ ID NO: 1325 - DNA, 156 bp, Homo sapiens
gcgcacgatgagcagctggtcgccctctgagcgcatccggggcgtctcggctccctccgattccgccgcctccagggcgcgtccgtcccggctccagctcagctccccgcgacctggcccccaccccaggcagcgcagccggagctcggccgcccc

SEQ ID NO: 1326 - DNA, 163 bp, Homo sapiens
cgggcccgggggaccttgagcgggcgggcgaggagcgggtgagaccgaggtcgacagagtgggggccccacgaggcccgcgcctggtcgggaagagagtaggagattcccccgcgagctcagacccggcactgagggaagagacactccgagtcctgcgtctc

SEQ ID NO: 1327 - DNA, 287 bp, Homo sapiens
gcctgccctccctggtctaccgggggttgcagcccctgcctgggggccaggacagccagtgcggcgaggagccctcccacgccttccagggcctcagcttgctgctgctgctgctgaccttcgtgctgcccctggtcgtcaccctcttctgctactgccgcatctcgcgccgcctgcgacggccgccgcacgtgggtcgggcccggaggaactcgctgcgcatcatcttcgccatcgagagcacgtttgtgggctcctggctgcccttcagcgccctgcgggccgtc

SEQ ID NO: 1328 - DNA, 228 bp, Homo sapiens
tttgagaaagtaaaaataacccaacgcctgagtcactgaagtcactgaactcagctggaaccggcagctccaagctgaactgactgcttcagctcacccagggcagcagggctggggccagaaatttgacgggggggcgatgaacacctgagcttttagggggaagtcccagtggttagtttgtgggtgaagcgcctgtcgctcttccttttattttaagctgcagga

SEQ ID NO: 1329 - DNA, 148 bp, Homo sapiens
acacagttatgggtcgcaagaagaagaagcagctgaagccgtggtgctggtatcctttgtcggtttgaagtcgaggtcgcgttggggtgccggttgttggggcctgggactaggaggcctggatttggcttacggcgtggagcgtttg

SEQ ID NO: 1330 - DNA, 693 bp, Homo sapiens
aggagcagaaaggaaatgcaccaacgcgttgggactctgagcgccaagcagaagtgaatcttggcgtgggaagcccggcaaagcccccgaacttcagagtcaggggaacctgggtttgaaagcctccccatcacctgcggagtgtgactggggcaagttacctaacagcgcctggcttccgctccctcctcactcaccgggttgtcctaggggtgaagggagagttcacccaacgcggtggacaaagcccttggcgcacccaaaggcctgcacaggtcgtagctattgtgatgagcaaaagggtggaaggaccggaatcaagggcacggctccaccttcaccgtggggtctttggcctatcaagttgcccgagatcgtggctcaggctggcccaaagtgacggccaaggcgaatccttcgtaacgtcagaacttcgctggctcggaccgcagaagtgcccttctccatcctggggttccgccaccctcgcgatcccaccttttggctcctcgcggcagaagcgaaggcccccgacgccccaggcccaggggcccagtcggatgcccgggtccagccgtgctcccccgggcgctcggcatccttccacccacgcccgcagcggaggcggagagcgtcacggagggagaagcccgcgcgccgttccgctttcggaatctggagccccatgtcacc

SEQ ID NO: 1331 - DNA, 141 bp, Homo sapiens
gcctggggagggaagattcccagtgggcgtgagaaaggcaggcggctgcccaggagagggcagcatcgcaccacctcccggaggagacgctactcgggagagctgcagccttctgagaggtgcgaagggatgagaaacacg

SEQ ID NO: 1332 - DNA, 308 bp, Homo sapiens
cctcggcctcgcaaagtgctgggatcacaggcatgagccaccgcgcccggcaagcgctgatatttttaagagctcccggggccgcccccgggagcctgcttcccgcggtgggagcctggcgggggcctgaacctctctctcctggcctcttccgtcctgtaggcggcgtccccggcctccagattaatcttccatcggaaggtggggcctgtggcttcgagggtaacctcagggaacttggaagaccaccagtgagggacttttacctcctttttcgttttcttttttggtcctctcgctttctctct

SEQ ID NO: 1333 - DNA, 159 bp, Homo sapiens
cgggcccccggcgtgtgggaaaacacctcacccgggcttcactcacgctccggaagacagggagtgagagagggtccgaagaggctgaatgacaggcggcctctccaatgccgaagctcagaactggtattttttaaaggaggtcttgcggttgctcta

SEQ ID NO: 1334 - DNA, 164 bp, Homo sapiens
tataaagtggtaacaggaaggtcaggtgagtgtgggctgcctacgagctgtacttactgccttctgtttcacaaaaggacgttttctccccataatgtcgttgttcttgctttgaattatgggtgctgggagaaactaaacgaagccgtcactgagcaatacac

SEQ ID NO: 1335 - DNA, 138 bp, Homo sapiens
tgctgggaggcctctgagagctcatttaatgccacttcctgttttcaggagagagaaacgtgaagtttagagaggaagggaagtgacttccccggactcctgcagctctttagtggctggccctggtcttgtacaggg

SEQ ID NO: 1336 - DNA, 213 bp, Homo sapiens
tgcagtgatgaatgattaggccatccaaacgtaaagatttatttgtaatttgctaatgatggaatgacacctgttgaggtacaagttcccagcaattcttggaattagcaatagtgtgttacttctttctcgaaagaagcatgatttgtaagcagctatatctgatgtagtaaaactgaaagttaaaataaaaaaggaaaccgtgggtcaaag

SEQ ID NO: 1337 - DNA, 164 bp, Homo sapiens
ccagggcccactcagtttcctgggccaacgcaacctggtcaccagcgtgtccttgccaggatgtgttccccacttccttccttctctttggtgtggtctcagacactgtacagaagagtctctggctccgtcgtcagggccaggcactaccaccagcttcctct

SEQ ID NO: 1338 - DNA, 146 bp, Homo sapiens
gtttcacaacttcctaaaacagaggcatgggattcattacctatttcttttgacttcattaatttaacgcaaatttccttcagaataatgaaactaaggagaaagttgaacaagccctgattcagactggacaccccagaattcct

SEQ ID NO: 1339 - DNA, 161 bp, Homo sapiens
ccggtgccaggacaagggggtgtgcgctcttcccgcaggcgcccaccctcacttttcccctctgcagtccccacccgggcgcaccgcctccaacccggtctcccccgccccaggccctgccaagccggggctgctgagggaaagagggcgccgggaagcgg

SEQ ID NO: 1340 - DNA, 154 bp, Homo sapiens
cgctgctgcctcaggctctcacctccctctagcggccgccaaggacatcacacacgccgagcggaagccctgctgggcggtgctgccggctccaaccccggaaaggccacgtccgagagagctcacctactttctcctggaggggctgcggtgg

SEQ ID NO: 1341 - DNA, 395 bp, Homo sapiens
aatgcttcttctgtagtagagaagctggacggtatgtgtgtgtgcttatgcgtgtttgaatggacgcaggaaaaatcaataatctgcttgcatcaacacctaaataaaaccaaaataatcccatgatttgcctaaaaccaaattaatctctaggaaaagcctgctgtgacagagttgtgtgggggcgggaattacaaaagaaacgcagaatttccccgagcttccgctttgcaggaatctctgttccgttactcactattttgagagagccctgcttcttcctccttctccccaccacacgtcaatgtcattttcacaggggggaggctacaggaagcacacatctgcagtgtgtcacctcccgaggctgacagatctactcagtatttgtttgg

SEQ ID NO: 1342 - DNA, 133 bp, Homo sapiens
acaggtccagggatccgcctcttgtgagaggaagcgcgagttaaatagtcccggccattcagcgcttccgcttaacttgccgcaaagtttttctggagaagtcggggtttttttgccgagcgcttttgccgac

SEQ ID NO: 1343 - DNA, 144 bp, Homo sapiens
tgcaccggggacgggcgcgcccatccgactcttcgaggggcggcagggccccatctgtgtctttcgctctcgagcccccagctagagttggcttcagcggaatacctactgtgcaggattattcaacaagccgattgatcacat

SEQ ID NO: 1344 - DNA, 138 bp, Homo sapiens
tccacctgctcctgtcccatcaactggaagagcggtcgttctgcctggtgttatttgttcagatccggcttttcgggctcacccaaatatatatcatttggcaaatgctaccttgaacgtagtagggatcttaagcgc

SEQ ID NO: 1345 - DNA, 182 bp, Homo sapiens
gtcgctcccgccgggcgagcatggggcgcctggcctcgaggccgctgctgctggcgctcctgtcgttgggtgagtgtgcgcggggctcagcggggcacacggggactggcgaggccctggagggctcggcggggcgcggctgcagcgcgcggcctggggcgccgagggtgcccgggctgctc

SEQ ID NO: 1346 - DNA, 337 bp, Homo sapiens
cggcagctggtgcaggaaagtcgctcaccccgaagctgccgtgggcaagttagaaggaaaccaaaacaagcgccgcgcccggagctgcccacgtgatcacaacacagcacgtctaacgccagggagccgggcgcccggggaactactgagccgcgccgcgccgggctccgccccccaggccgctcgccattggtccattagaatgggtaagggcggtgccgccagcaggagggaagggtgggcctcacgtggagcgggagaactgggagctgcgcgtgcgcagactggagccggttcattcataaagaaacagaaaggaacccggggtcctaaaggc

SEQ ID NO: 1347 - DNA, 148 bp, Homo sapiens
ccatcttcgcaacctttcaccccgccaaaccggcaaggccgtgctcaagaggggccagtgatccgcgtcagggacagcgcgggccagcccggctgcgccacagcggcccctggcggcccggagccgtccgcgcccggcgggagtgcgc

SEQ ID NO: 1348 - DNA, 143 bp, Homo sapiens
cgccccggccgggggcggagggctccgcccggccaatggggaggcgtccgcccggccaatggggaggcgtccgccgcgccctggccaatggcgacgctcccaccgcctccgtcccccaggttgaaagcggcccgggagccggc

SEQ ID NO: 1349 - DNA, 165 bp, Homo sapiens; identical to SEQ ID NO: 414

SEQ ID NO: 1350 - DNA, 148 bp, Homo sapiens
aatggtgcaggcttggggacggactcatactacagcggtcgcaagagggaagagcacgtctttgctttttcttggcatccgaaaactcaagctcgaactgggggcaaaggccagcggctgcggttccaccggctaaggcgcacacatt

SEQ ID NO: 1351 - DNA, 135 bp, Homo sapiens
gagaatcggggctacaaagccggtgggcaggtttggctacgctcaaaccgggcagtgccgcggtttaggcgtctccttccttcccagcgactgcacaaaatggcggccgccgctgagtcggctccaacttaacgc

SEQ ID NO: 1352 - DNA, 144 bp, Homo sapiens
ccaggagagggcagggaggctgtttaaacaggcccctcggcctggggcagttggcagaaatatttggaacagggtggggagcacagctgtggtttggagcaggaagctggggcccggggtgggtgggctgagcttgactgcttc

SEQ ID NO: 1353 - DNA, 142 bp, Homo sapiens
cctaaagtgctttggccagcatcacctccgcgcacagcccgggaagcctgcgtttcccaggtcgcgcagacggcgcaaagggggaaactccacctcgctcggctccgcgcctcccaaatgcacgcaaagggctgccgtcttc

SEQ ID NO: 1354 - DNA, 136 bp, Homo sapiens
tggcgaagctcttggagaggcgtcgagcacagtagggcggcgggggtgcgttgagcgctcgggggtcaggcagtcggccgggatcgccgctggggagcgtttccgaggcgaggaggaggaggaggagatgctgctc

SEQ ID NO: 1355 - DNA, 151 bp, Homo sapiens
gcgcgtctaggcgacggcggctttccccagattattgaataattgcataattccgagcgcgggttgggaggcaatgccgggtccctaccccgggtgtcaggtaacgtttcgggggtcctgcgctgcgcgactgtgtcccgccgctgctggc

SEQ ID NO: 1356 - DNA, 543 bp, Homo sapiens
taccctccttggccgcaccgctcgccggtcactcaccagactacatctgattggagaaggaggtgggtgcaccctgcgggccgtagccttgctgcccatagtcgccctgaggcccgtagccactgccaccgctgccggctggttgaccatagtcaggctggtagccgccctgaggcccgtaggaatcctggggcccgtacccgccggggccctgcccgtagcctgcatcgccgtaggcgtccccgggtgccggttgtttctcgggggcgccgggaggcgcgcgcaggaacggggcggcccagcctgtctccttaaacacgaaccacaggttgccgacccagagcaccaggttcaggaagccgaacacctgcagggagacaaggctcggctgtggtaccccgcccattgccttggcggccctgcgtgcaggaatgagcatgcggggaatgaatccgtaggctccgcaaggtgggggtttctgaaacccagactctctgagtcccagtgcgagaacgtcgatgtgcagaaaaatcacctctggcg

SEQ ID NO: 1357 - DNA, 232 bp, Homo sapiens
gccgagcgggtcggggccggcgcgccggtgtatctggcagcggtgctggagtacctgaccgccgagatcctggaactggcgggcaacgcggcccgcgacaacaagaagacccgcatcatcccgcgtcatctccaactggccatccgcaacgacgaggagctcaacaagctgctgggcaaagtcaccatcgcacagggcggtgtcctgcccaacattcaggccgtgctactgc

SEQ ID NO: 1358 - DNA, 936 bp, Homo sapiens
gaactcctgtctgtgcagcctccagccggccaggcgctaaataaggccacggcccgtttcctccttcaaaagtcccttgtaaagggcgatagcagaccccatcaggcaaaaagctgagaagccagggttgaaatagaggcctctttctgtttggtcaatcagcagctgcaaaggatgcgtaggatggagctaaatttatttgttcctttctttctcagcaacagcgacgaggcccgaggtgcagctgtctcgcctcgcctgtcttttgcaggcaccggcatgcacagaagatggctctccgggaggaagattcctttccattttgttctctctctgcctccgcaaggctcgcagccacctctcgggagtgcagggccagatcctgtgccagcgggtaggaatatgtagctgcctcccagccccagggtggaaatcatgacctttgagaagcaggcaagctgcacggcatagatactcaggcctggtgaaggcaaagtggggccacaccctagaaaaaccacaaaagtccccacagcctctgctttcactagtcagacctgtgggaaacttgtaagacacagtccatgtgatcggcgggtgggggcatgttgggaggggccttccgaaggccacagccaggctggcagggcagagtcctttccagaatttatctgtttgcttaaagcccagcggaggggccaccttcagtcaaccctccagcatactggtccaagtagttttttcaaagtgctttgtgagactttcaaaaggtacccatggggagggaagtgagaggaggaggaggggacggtgaagaaacagcttctttatttctagccttgcttgaatggcttcttgacggttactgctccagttttgctgagtcagaagaatcccacagccgctcaccggaaacacagctgttgggcaaaaata

SEQ ID NO: 1359 - DNA, 245 bp, Homo sapiens
cctaagagctgcctggaaagctgtatttgctgcacgtggaaatctccgttattttccagcacccaacagtagcgtaatgggagtaacggacttaacctcatttctctttcagagcatttagccttcatatgcccttccctgcatgcttcccccaggccgtcaagacttggtacgctccaacttctgagtcgctcccgcagccgagaaggggccggggtatgcgagcttccgcagagtggggaggg

SEQ ID NO: 1360 - DNA, 133 bp, Homo sapiens
ccatttctcagaaagtgaaagagaaataagaattggcagaatgttgcgaaagcacggcacatctttggccaagtgaggggtgagaaagccctgatgtgtcttcaagattcatctggggaaccccctaatgcta

SEQ ID NO: 1361 - DNA, 217 bp, Homo sapiens
accccgggacaaatccgggggcggaacttcagaggtccacgctggcgcctgcgcgtgtggttgaggatgggctggcggcgggtccgggtccgctgcctggcgctgcgggcggcgggccatggtggtttggattgagccgggcccggccggggcgccgagtcggagggggtggcagtgagcggcggcagaggctacggggctcggtttggctgactgg

SEQ ID NO: 1362 - DNA, 344 bp, Homo sapiens
agactaggcgcgatccctgcgcgcccctccttctcttgcgcttcagggggccggccctcagggggcggggcagcatcgcgcgcaaggcctgccggttgctcggggtcgtatgacgcacttttccagctcgagccctcacgaggccgtgggtacgaccggaagccgcaggtgggtgaagcggaaacgcttcaaaccgggatgttgcgggccgtagcgcgtgggcggccgtggggtcttgggcgcgcgcggtgtttctggcggtgggtcaggacttgcgggtcgcctccgccggtgttgaagcctcttgtgtgcacactttctcctcagcacttgggacgacctaa

SEQ ID NO: 1363 - DNA, 151 bp, Homo sapiens
ggcgcacggaggtgatgcaacgcgctgaaaatgcgggatccagtgaaggagacaggctccgcaccggccaatcagtgcgcgctgcctgacacctgccaacaagccaggcgccgattggtcgcgccggacatgattgcgcccactggctcgg

SEQ ID NO: 1364 - DNA, 246 bp, Homo sapiens
gctcccgggtcagctctggcactcgccagctgagcccagcgccagtctaggtgagccccacggcggtgagggacgctcgccagacggcccagaggagttagatgacgtcacctccaggaggactcgctttttcattaatgaaaccggccggcgcgggcgcatgcgcggcaggccgccttccctctcgcttccccctcccctttcccagccgcgctctcaatctctagctcgctcgcgctccctctc

SEQ ID NO: 1365 - DNA, 146 bp, Homo sapiens
gtgtaccccagaactctcctgcgactgtgagccgagcttactgccttcagctgggctgcctggtcttccacttccggcgcgaacgttgacgtcacgtcgtggcgcacctcagtggcgtcagagcggcgtcgggcctggcgggaaag

SEQ ID NO: 1366 - DNA, 144 bp, Homo sapiens
gcgcgcattcccgagcgccgcgagccggccgaagtcgggcgagcgcgccgtgcggcggctgggagtgggctgcatgtgccgcgcggggagcccgcccgacttcggggaggcagcggggcgccgtggccccgcggctcagctccc

SEQ ID NO: 1367 - DNA, 173 bp, Homo sapiens; identical to SEQ ID NO: 506

SEQ ID NO: 1368 - DNA, 946 bp, Homo sapiens
tccttcaccagcctcgtgtccccctaccggaccccggtgtacgagcccacgccgatccatccagccttctcgcaccactccgccgccgcgctggccgctgcctacggacccggcggcttcgggggccctctgtaccccttcccgcggacggtgaacgactacacgcacgccctgctccgccacgaccccctgggtaaggcggccgggcgagggtgggggcgaggaagcgccacccggcaggtggcagcgcccgggaggccgagggggcgaagggggcaggcggtagacggctgtggcaaaagcgatggaaaagcagctgtcgggcacgcgcggggacgggaggcgcgcggccggggctgaccgcaccgtgactcagattggttttcctgcaccttgcaggcgtcggggcgcgcgggccggcggtagacctcgcggcgagggcagccgtggaccgcgcgtgttacccggggtggggctcccttagcgggagggacggggaaaggggcgtcgaggcgcccctggccggcccccgtggggcagggatcgcagccgggcccgggtggctacggggctggacctggttcaacaggcttgtgcagtgaaagagcctgaccctttccgttcatacaggaaatcttgagttctcgataggagtaaatctggtttcagaagctgttaagtgttttcctggctgcatgaagcagacccttcccccggagtagtgcacgctgctgattattttatcgacatcctcaatacagacaaattcaggaaacactcgacttctgatagccgggatccgtttttctgatattgttcatttcctctgtgtgggatgtgactttatggcagctaaaataaccagttgcttcctattttttttcgaggctgttttgcaccagtctgaagcctgacgcaagcaaaatctcgaaaaaacaatgctagc

SEQ ID NO: 1369 - DNA, 155 bp, Homo sapiens
ccccggccggcggagaggaccggaaaagagaaggcgcggacgcagcggggagcggttgggcctgagccccaggtagcggcgcaggcacgagcccgggaactctgccccctgggggcgggcgccggccgcgcaagctgctccggacctacgctcgg

SEQ ID NO: 1370 - DNA, 198 bp, Homo sapiens
agtgcttcaaggccggcgcagccgccatcgccgggctctcgctcctctttccggaaggcccctggcgctaccgttccgctccacggcaggaaaccaaaggttccggcgtccagagggcgcctcccagtcccgggcagcttttcttggaacaccggcggctctcggaagcccagctgctgtctgaactttgagccgagt

SEQ ID NO: 1371 - DNA, 145 bp, Homo sapiens
ggcaagttgctcaagggtatcgacaggtctgagcccggttggaggaagcgctctggccaagcggggcggaggagagggttttccggagacagcaaggggtgttcagggtcctgggcttgccgcggggtggggtttctctatcctc

SEQ ID NO: 1372 - DNA, 127 bp, Homo sapiens
gcagcttgacatataagacgaccatattgcagctgtaccgcatggaatagcggctccaaggcccaccttcggtggtttgcacacccctctttgcactgttcagaaaagcaccccctccttcccgccc

SEQ ID NO: 1373 - DNA, 161 bp, Homo sapiens
ggtgacactgtgtcgacgtgcgtttgaagggaggacggctgaaggtacatgcagtctcccggacgtcacaaactccgcggacgcgggtcacacccgcgcgcacgcgcagcaggggtcttagccacacaggcgcacggcggggcacggcggggcacgggccc

SEQ ID NO: 1374 - DNA, 126 bp, Homo sapiens
ttggggcaggaggttccgcgagacccagatcggtcgcggggccgtgaacaccgcacctcacggacaaggacgcgccgccggcggagtgggggccttcgtcgcgctcccggccttgcgccatgggca

SEQ ID NO: 1375 - DNA, 31 bp, Homo sapiens
actgccactccttctccgacccctgacccca

SEQ ID NO: 1376 - DNA, 148 bp, Homo sapiens
ctcggtctcggcttcggccttcgccagcacctaccgccagcagccctcctacccgcagcagttcccctacccgcaggcgcccttcgtcagccagtacgagaactacgaccccgcgtcgcggacctacgaccagggtttcgtgtactac

SEQ ID NO: 1377 - DNA, 148 bp, Homo sapiens
ctgccgctggccgctttctccacctccccccgccccgcccttctctgataccttggcgaggccggcgcacgggcctggggacggggaatccagaaggcttctagaggctgagaattcctatccctcacccttatgaacctcttctgtc

SEQ ID NO: 1378 - DNA, 145 bp, Homo sapiens
acgaccgctgcggcgtcagctcagccttgcaagaccccaggcgcccgcgctgcacctgcgactgtcgccgccgccgtcgcagtcggaccaactgctggcagaatcttcgtccgcacggccccagctggagttgcacttgcggccg

SEQ ID NO: 1379 - DNA, 117 bp, Homo sapiens
tggcgcggaatgtggtgtgagtaggggtcgtcacccccccgtcgcggggcgccccttagtgtcacaagcagacggaccccacagggcgcgcggactccggggagcggggtgggcgtc

SEQ ID NO: 1380 - DNA, 153 bp, Homo sapiens
aactttggccaggtcctgggctgaccgtccgtttgcatcccccacttctgggatccgagcaacgggaatcccccgggcggcgtgggaatgaaccccattcctccggtcccttgtggctcaggcaaagttccacgtccgaaatctggactgggg

SEQ ID NO: 1381 - DNA, 272 bp, Homo sapiens; identical to SEQ ID NO: 72

SEQ ID NO: 1382 - DNA, 276 bp, Homo sapiens
atacattatacgtttatataacttgcttaataaataatagtagttattaatatccaatggcaagccgccgggaaacgacggagctgggatttgaggattggctccgcgaaccccacaacacccggggactccagcgaaccacacggggtggatccaacagccgcaggggcatcgtggtcctgcggagacgccgcccgcccggaggcggcgctgtgacccaggttggagagtcaggagcccagcgccgcgctgcggggcctgctgggacttgtagtt

SEQ ID NO: 1383 - DNA, 246 bp, Homo sapiens
aatccagccaacccaggcctgtagtgtgtaaatgccaactcagcgggagggctctggctgtcgcccagagccgtttctcggctctttcgcggttgccggcgcgctcgggacaggaggaacccgcagcccgcgggagtcagcggagacccgaccagcactatccagccctctgcaccgcccccgcggcgaggtctggaccaagtcgcccctagcaacaacagccgggccggctttctcaggccatgc

SEQ ID NO: 1384 - DNA, 116 bp, Homo sapiens
ctaaatttgcctcccccggccttggggggcgcagagatcccggcggcgattagcgctgcgcggcagccggctccaacccagaggcccggaataggcgcggagttataaatagtgcc

SEQ ID NO: 1385 - DNA, 149 bp, Homo sapiens
tcccctacccttccccggacggacgcgcagggcccgggaggaactggttcccgggacgggtgggggcctcggccgcccacagagcccgcggagaagggaacggcctcagcctcggctccttcccacacctgggccccaccctgcctccg

SEQ ID NO: 1386 - DNA, 700 bp, Homo sapiens
tgctgaagggttcacctgtcaaatgctggcgagcaccctctacgtgtcagactctgggctgggcactggggccaataaaacagtcagtgagacatggacagagagtgaagggagaaccaccctgcagggtcgggccagattccagccaggctcagggcaggccaaggacgagagggaggagagagctccaggcttcagacacaggacagccctgcctgcaaacagcggcccctcccttccggcgcccccacgaccagagagtgtgtgccaagacagggcctcccgagggccacggcaggagaggctggcgtcgggccagggaggaagtgggtagggcctgagagatcagcataaggagttgtggtgggtgggcgacgcccccgccaggtcctgtttgtacagaggaggggccacagcagacaggacagggcagagagatgcctgggcaccaccctggtgacctgccagaaggggccccaaaatatcactaggccagagagataatactgcaggctttctggggcagcgtcgtgaggacctgcagagctggaggttctcatcttcctaaagggcaattatttttatcatggccaaggttgggctgccacttatgaagacatttcccgtgctaggcccacatgaatctaagaaaccaaaacactgagtcagccacagtggctcacacctgtgctcctagcac

SEQ ID NO: 1387 - DNA, 290 bp, Homo sapiens
gtagactcagatgactgaatggtcctcgggatctgaaggccagtgggggagatgaggcctggcctcccggaagtgctcagtaaacatttgttaatcatttcctgcctagggaagctctgtggtatgctcaggagaatcttgcttctcatgggggaatgggtggttgtcatttgggtggcctgactgccagcctgcttgctggctctctgggagttggggtggtggcatcaacctgcagaggcggggcagtggggcagctcacggctgtgtgggtaagtaagcagtgagca

SEQ ID NO: 1388 - DNA, 86 bp, Homo sapiens
accagctctggcagcctaagggcttcagtttctccccggggtccgcgagggaagggggcagccggcggtgagcaggggcgtttgtt

SEQ ID NO: 1389 - DNA, 149 bp, Homo sapiens
gggtgctgcccagcgcgggtgctgggtgaccccggaggaaagagtcattccgagggcctgaagaagggaggaatcggtggcttgtaaggtgcactcccacttcctgtggttttcacaggcgatgacatgaggactggagatgaaatgaa

SEQ ID NO: 1390 - DNA, 201 bp, Homo sapiens
tctcgtgtgttgctgcttcccagcagcatgtagttcagggcccggggcacgttaagtcctcggtacatatttccagttccggattccttggtgagcctggacaagcccctcccgctctctgcgcctcagtctcccaagcctgtcaccggaaacccctcccgcggtgccgcccctagcggggccgggtcggggcggccttac

SEQ ID NO: 1391 - DNA, 148 bp, Homo sapiens
cggggcaggtcgggatctggaccccgccccgcgctgcgttgcagcatggtctgcaaaccaggccgggggcagaggggctcgcacctgagtagcggcctcgcgcagctgcgcgctcagagccgagttcttgagcgtctcgcgggccttc

SEQ ID NO: 1392 - DNA, 319 bp, Homo sapiens
agccgtgtgcgtgcgtgtgcgttcacgcaggggctcacccagcggccacgggcttctgaagacccgggtgggaagtgcggcccgggaaagcgcaagcgtctccatggcaacgagggcggacggcgtcagagcgagtcgcttccggaagtgacgtgcggaaggggtgcccgggacgaagccatggccctggaggcggcgggagggccgccggaggaaacgctgtcactgtggaaacggtaatgctgtcaggcgacgcgcaggaggcgggggccgaggccgggcggcccttcgcggaccctccgagctcatagtcttcagg

SEQ ID NO: 1393 - DNA, 163 bp, Homo sapiens
ctccgccggcagctccgcctcctcccaaaaactcttctccatcagcagctccagttcgttcagctgctccatcctggacgcggggatcgcaaactgtagacagaaaagacagcggaaccgggggtaacacagaaagcttagaaaagggaaaaaggcgcgagcc

SEQ ID NO: 1394 - DNA, 154 bp, Homo sapiens
ggcccgggaccggggcagagaaagggcccggacgaggaaggcagggccgcggaccctccctgtcgctcgcggcccggggcgcctcctccccatggcagatctcagcacgttaagatgcgaaggctgattgtcaccaagcggcggcgcccgcccg

SEQ ID NO: 1395 - DNA, 136 bp, Homo sapiens
accaacatgaatttggagctaagaaatacgggtaggtcaggaaaccactaaaatgttgctgccttttagcaatggttcgtgaaactgaattaattgatttttccgtcactgctttcattcttttctgagtttcaag

SEQ ID NO: 1396 - DNA, 145 bp, Homo sapiens
gggtgttaagtacctgaatgagcactggaccagagccggggcgagcccggaaggtgccacctccgcccccgccccgccccgcaccccgccccgcaccccgccccttggcgcccagttacctcccagaggctgcaggaagcagcat

SEQ ID NO: 1397 - DNA, 141 bp, Homo sapiens
ttggctgcttgtggggtcctcttaggctccggggggcctgcggcggcctgggaggcagacccccgcgggcaggtgtggccgtgtcccgaccgcgcgaggaccgaagttggcggaagcccctgtgcggtgccttccagcccg

SEQ ID NO: 1398 - DNA, 405 bp, Homo sapiens
ggaaaggactgacagcgcacctaaccgaggcgcccagctacagccaactgcactgcctcgggagccccactcccaccccgcctctgcgggaccacttccggcgccttcctatgccgtctgcccgcccccttccctccacggcctatatcctttcagggccgccacagcgctcgcgagtccctgcgtaacttccgcttttaggccgagacacgtacaaacgtgatacgtggctgctggcgtcgacccgaggggcagggactaggcattttagcaaccaagggggtgtggctaagcgagagagcggcttccctggtggcccgggcgcgcggtcttgtcatcttgttgctccttgtgagcgctgggtagagaaagtgagggggtagagggtttacttgccaggcctgg

SEQ ID NO: 1399 - DNA, 216 bp, Homo sapiens
gccgccactgctgccacgacccaaggggtcccagagtcgccgccatctttcccaccaacgacccttcatcaaaagcccgccccgtcgcccaacccattggcccgaagagccatctgccctgcgtcctattggctttcgtcaagcccccgcccctgcaggtgactatatcaccgattggctggcttctgtatcagttgccttgccaacccagaaaag

SEQ ID NO: 1400 - DNA, 312 bp, Homo sapiens
tcactgtggtacctgagcatgggctgctgcgctagcctaggcctccaccgccgggaccccagcctggtctggggagaactgtgtggccagaacagaggggccctgtggctccaggcaacagggcagggctggcggcgggggcatccctgggttggaggcctccgtgggagtgggtgcggcagttacctcaggagaggaagttgggggtgtgggctgaggaggaggttgcctcagacaggaaggccaagtgggccagggcagggtggaggtggtggcaggaggggacccaggctgtgaggttcctggtgcggg

SEQ ID NO: 1401 - DNA, 174 bp, Homo sapiens
gggcgtggccacgtcgaccgcgcgggaccgttaaatttgaaacttggcggctaggggtgtgggcttgaggtggccggtttgttagggagtcgtgtacgtgccttggtcgcttctgtagctccgagggcaggttgcggaagaaagcccaggcggtctgtggcccagaggaaaggc

SEQ ID NO: 1402 - DNA, 194 bp, Homo sapiens
gttaatggctgcacacactcagaaagtcgagttcctgcagctggttgagtggtaagttgaagtgagaattaggcaaataagtcagcccttgctcacatctgctcttgtggtctgagtgggtggatcttcctctcctccccaaccactgctcaggaatagtcaagaacacaacgcctgggtgtagaactgcatca

SEQ ID NO: 1403 - DNA, 144 bp, Homo sapiens
tgggctggaacaactccaccttcgcctaagagccgcagggacccacgctgtctgcgctggctccacccgggaacccgccgcacgctgtgttctaggcccgcccaccccaaccttctggtggggagaaataaacggtttagagac

SEQ ID NO: 1404 - DNA, 218 bp, Homo sapiens
cccccacgaggcagggcttcctgcccggcaggaaggactcggccggcgcctgcgggcaaccgatgagctgaaggcgccgcggctgggccgtcccgctctcccgccgccgagcgcgctgtcctcccgctgcccagagcgtcgccggaagtgccgagggggcgggccaggggtggagactggcgtttccggcgcgcgacggggcggggaccgtagcgggt

SEQ ID NO: 1405 - DNA, 157 bp, Homo sapiens
gcccgcttggtctgggccactcccggaggccgccgcgtgggaaaggtgggggcgggggcgggcgaggggagcgctatctgtctgtctatctccgcgtccccccagcgcccagcgcccgccgctccgagcccgtggcggggcgagttgccacccgctc

SEQ ID NO: 1406 - DNA, 125 bp, Homo sapiens
acacagtacacagtcaaagggaattcccccaacaaaggtcaaggcgagtgaatctcagcacaacagccttgcaaaaggtcagaaagcgccagatctggtgtgaagcaggaagtcccagggcacca

SEQ ID NO: 1407 - DNA, 148 bp, Homo sapiens
tcctgactgcaagggtgggcggggtggacggctcggtgttctgcccgttgtgtcttacgctccaggtgctggtctacgcgggcctggacagtcaggggtaggagcgggagccgagaggaggcggaggagatggcgtcccagccgccac

SEQ ID NO: 1408 - DNA, 92 bp, Homo sapiens
gcggccgcggcgaggctcccagggcgccgggtgggcgcaggattgctaaacgctgcggtttggctaagattgcggagccgagaagagaaagg

SEQ ID NO: 1409 - DNA, 351 bp, Homo sapiens
ggagcttgcgaaggcgtccgggtcgcacccggcctgatccgcacgccgggctgtcgcgaatcccaggccccgcgccgcttcccccggtacccgccctcacctgcgggcccagctcggccggcagcttctgcagccgccacaagggcgtcccctcttccggctccatccctgcgcgaagctggggcttgggtcacgtgtcaaggctggccgcttgtctaaagctacgactcgcccacgtgactctcgccggcggggaggggcgtggacccaagaagtccctgtgcgcttgcgcagagaccgaactaccgctttccccgtaaccagggagactgcagtttgcagtgatgtggc

SEQ ID NO: 1410 - DNA, 154 bp, Homo sapiens
ctcgggcggcgggcacagacccgaggagccggagcagcagcccgggtgcggggtggagttgcagcccggaggaggtggtcggggttggcaggtggcaggagagtcgcagagctcttgagtggaagacagtgtcggggcacaccctcgtgccgga

SEQ ID NO: 1411 - DNA, 612 bp, Homo sapiens
tcccaaagtgctggaattacaggtgtgaggcaccacgtccggcctggccaggattaaattttttcatgtgaaccacaacactaaaactttgtatattgctgcgcttatcttacaaatcaggaaataggggttcagagaagttaaatagcttgcttaagtcacacagccagcaagtggtaaagctgggatctgcatgactacagagcacacaggctccccaccagtagattagagagggggaggtctgctttggtgcagagacaggtgggatctgtgatgcccgttcttggtttcaacattcttttaaactctcctatctgagcctaggactttctgcagccttcctgttttaggctggcagctcacagtccctctctggttattttcaggtctgtgtgtgccacagagaggaagggggcaaccacagtgggaaccgctttccagccctgctgcaaccccttttgaaatagcaggcgagagggctggtggcctccactgtgctcttctgttcctgtctgtgggcatggctaaagcaaacaagctcacccacaccagctcccatcgtgcggtggatcagtgcatgtgcttggttctgtctggcactgctgatgg

SEQ ID NO: 1412 - DNA, 148 bp, Homo sapiens
ggcacagacactgtcactatgatttgccatccccgcctccccacgctggagagcagcgccctcacagaagggccgagccgcggacgggccacacacccgcgtgtacacacagtccgagaacgcacacacgtacacacacacatgcgca

SEQ ID NO: 1413 - DNA, 137 bp, Homo sapiens
tggccagggctgcctggagctgccccttccactccgcccccagggagctcccgggtcatcctctcatccgggctgccccgcggcccccaaggagccccacccccgggaccaaatggcccgcaaggtttggggcagcg

SEQ ID NO: 1414 - DNA, 179 bp, Homo sapiens
cttacaagtcagtggccctaggctgcgtattcatgggctcagatgagaaagctttctctgttgattcacaggaagagtattcagacctttgacttcctgtttttgatgaacctagtgaaagaaaaagaagtgcctttttaaaaatataattggccccaaacggtaacacataaaagaga

SEQ ID NO: 1415 - DNA, 149 bp, Homo sapiens
tcgagagcccgggacaaatgcacttaagaaggggcgacgggagggccaggctcgccgggctgagtgctgaggagggggcgcgtcccacccatgcaagcccggaacaaaggcgcctgtcactcgtcactctccacgcgggctggctctgg

SEQ ID NO: 1416 - DNA, 1100 bp, Homo sapiens
ctgggctgggctggtgcacagcctgggcccggcgcggcgggggttaaggtgggcgcccgcgccccgcgccccgcgccctcccgccgggatgagagcgcagtccgcgccgccagcccgcccgctcgctccgaggcggcaccgggagaaagtggcggtcagggatggagctgctgccatgacaaccccggcggtcggggcccgcgcgcgtcggggctgctcccgggaggaaggcggcgcggaggccgggggcggccgctgagcttggcgtccgcgcggctccggtgcgggctgcgccgcgccttccccagcgagctaccgagcttggggccgccgcggtccgctcccgccgcccggcctctccctcctcggccaccgccgcagcccctgccccgccgagccccgccggacagcggcggccgcagcgcgcatttgggctccgaggaagttgaccgaggcggctgccgcaggatcccgggcccggatcgcacgaagcccgcgcggccgtctcctccgcgcgccacccctgcgcctcccgcgagctccacttcccatctgctattgtttccgattgttttccggtggcgagcccggctccgaaacttacaaagtgttggatgtcccccgttcgaactgagggactgcagaccgcctctgggtagctggatgaagcccaccccgtccccttctggtaccaaagtgcttactcctctccaaagtgccgtgtctgaactgccgctgggaagaagcggctcctgagacgcgcccacacctttcacctgccgcgcgcttccccctcctcggccaccttcccggcggaagcagcgaggagggagccccctttggccgtcctccgtggaaccggttttccgaggctggcaaaagccgaggctggatttgggggaggaatattagactcggaggagtctgcgcgcttttctcctccccgcgcctcccggtcgccgcgggttcaccgctcagtccccgcgctcgctccgcaccccacccacttcctgtgctcgcccggggggcgtgtgccgtgcggctgccggagttcggggaagttgtggctgtcgagaatgggggtctgtgggtacctgttc

SEQ ID NO: 1417 - DNA, 491 bp, Homo sapiens
gccagagcctcaactgtctctgcttcgagatcaagctccgatgaggacccagggcccctgccctctggggagcggccagcccccagggcccatgtgccctcctccctgaagagcctttccccacgccactggaaccacagatggcctgccgagcacccaggcctgggaactggaagtggcagcgcagggcctggctccctgcagggcaggactcttggccggctggacggcagctcctctggagggccagaaaagagaggggctagtgctcgggcaggtgccctggcttcccttcccctccacacgtcaacgattctatttgaagttgggcaggggggtggcgctgctcaccacacacaagtgttataggaggagtctggcccttgagtaccgggtacgcaggggtgcctcaaccacactccgtccacggactctccgttattttaggaggtgagtgtagtgccagtatctactctccttcttaaaaaaaa

SEQ ID NO: 1418 - DNA, 147 bp, Homo sapiens
tggccgagagctccgggctgggaagggagcggagcgggagcgaccagcgagcgcagccggccgaggtacgggcgcctggcggcgccgcaacagcggcaacagcagcaggaaaaaaaatgagagcgagctagagagcgcgctggagag

SEQ ID NO: 1419 - DNA, 279 bp, Homo sapiens
cccgcggacttgaggcgggcagatctggggggccccgactccccagcggccctgtagtggtgcgggcgaaactctggccccagataggaccggtgagccgaactggggtgtgcggagccggggctccgggggatggcccggggcggcgtggcgggcatgagagctcggggctccgtcacgtactccgagtcccgcacgcactcagcgtcgctctggggccccacgtccggccctcgaccttgctgacaactttggcggcccgggcctgccgcggccctc

SEQ ID NO: 1420 - DNA, 148 bp, Homo sapiens
agagtactctccccaggaagcaggagaatcgcccgtggggagatgcaaagagggctgccgtgtaataagcgacttctgccttgtaggtacattcactggcttatatgcagcgggcaggtctcactcttccccgtgtacagacgtggaa

SEQ ID NO: 1421 - DNA, 167 bp, Homo sapiens
aaaactaagcaatgtggcttctaagaacgtggcttctgaacagctcagaatcaaaacacaggaagtaagctgttaatggcacaatgaaatgaataaaaactattttgggggtgaaccagaatttgctctgctatttactggttcgtgttcaaagtggggagaggggc

SEQ ID NO: 1422 - DNA, 237 bp, Homo sapiens
aatctttgctttctgtcttttgagacgtctgaaacaggctaggaggggctcagggtagagagttctcaagccctcctccagctagggtctggttagccagagcccttcttggttaatctcagtgctgccagccaacatcaccacatctcagggttgttgctgggatggggacaggggtggcaaaaaggtcactggctctttagacgttttagctggtgagggggaaagctagcattg

SEQ ID NO: 1423 - DNA, 475 bp, Homo sapiens
ggagtcatttgtaatgacagggtgcgttctgcgcacagtttcagagtctgtccaaagggccaatgctggggctgggcagaaacgatccaaggcctgtgagctgtgcagctttataggcaaatgaagatcgtttacccagaattgcctgctggagacagcatagaggaagtggcggcaacttcaccagttccaggaagcccaggcagcctggtcccccagggtgcacctggcacagcagttcgcatggggccagagagcggcagctgaccgctgcaactacagctggcctgacaccgggcacaggtaccagcccagcccagtcccgcccagcgcagcctgcggcccctagccgaaccagcacctggcaaacctgacacccagccttggagcttgggcccccctctgcagctggctggggctcctgagacagcttctttgtcggaatccactcagtacacacacggtcccaaactta

SEQ ID NO: 1424 - DNA, 149 bp, Homo sapiens
aacaacctcaatgagaagatcaagaaggatggtgagttctcgggatagtccggagtccagactgtcccgcacgggctggcccctcttccgtcccctgcacccgcctctctttctaagtgtttgtccagccaaacttcgagttaactcct

SEQ ID NO: 1425 - DNA, 134 bp, Homo sapiens
ttgctaggccaatgctgctgtggtagtgcgactgtaccacaggtccacgaacccatttcctgccaaactctcagtcatgccacagtgactagtaacaagaacgaaagaacaaaaggaaaagaaaaaaaaaatct

SEQ ID NO: 1426 - DNA, 140 bp, Homo sapiens
gcgcatgcgcccgctcagcggcctgcttctatttatgtgggggatccaacatggcggccgcggcgaccctggcgatggcggtgaagcccatcagaacgtagtagcggggaaggggacacggtccgcactcaccgtggcgc

SEQ ID NO: 1427 - DNA, 172 bp, Homo sapiens
ggtcaggtcctcacagtggcgcctgagggctgaggctcccgctccagcactgctccgctccggccgcatccaggccccgcccaagggcggagtctgtgttcgccccgccccggccctcaactcctagcaggtgtaatccgaggtgactcaggacctccaggtcccccatgtc

SEQ ID NO: 1428 - DNA, 142 bp, Homo sapiens
ggaaaagaggaagctggggatttagtatcatagagaggcagtctcaagccgcagggctgcgggaaggaggtgtctggagcgagagattacagaatacaatgatgaagacaggatccatgcccaggctgtcttgtttactcca

SEQ ID NO: 1429 - DNA, 146 bp, Homo sapiens
aaaagagaaaaagaggaggttgacttcgggcccccagtggggggcatctctgttttgacatctctgttttgcggttgaggcgtttagcaggtggttgaatcctggctggtggatgcacctgctttttggggtgtgcctgctctgtg

SEQ ID NO: 1430 - DNA, 139 bp, Homo sapiens
tttcactcatgagtgggacaccccctgactctggctacaggggaagagcacggttccatgccatttccctttgccagtgattgtttcggtgatgaatgtgtaagccatttctggccaatgggatataagggcgtttaat

SEQ ID NO: 1431 - DNA, 143 bp, Homo sapiens
gcggcaaatgcagtcaggcgagcagcgtcctgggcggattcagaccctggggaagtctggaattcctcaccccgaccctcgtcccggaggctcaggctggcccttccaatggcactggtggggcagggcagcggggcaccctc

SEQ ID NO: 1432 - DNA, 136 bp, Homo sapiens
gagtgagggaggaagggagtcccgccaccaggcactctgcctgcactctgtttgtgttgtgggcctttcatgtggtcaagccgttcctgaggccagaacccgcagagccgcggggggccagcagtgcaggggtgag

SEQ ID NO: 1433 - DNA, 146 bp, Homo sapiens
gaacccaacggcagacaggtcctagtgcccatcagatacccgcggccgggactcggagctgtggggtgtggggaggcggaggcaccaactaagagcgacctagcatcgcaaagccgccctcggggcgctcatggcgggacgcctcc

SEQ ID NO: 1434 - DNA, 144 bp, Homo sapiens
gtcgctgactcgaagctgggcggcgggtttcagaggctgagttcttaacaccagggcacttccttgtagccaccacgcccggctgcatcctccacccggccggtttctagaaataggagataccgagaagttagggtggcccag

SEQ ID NO: 1435 - DNA, 159 bp, Homo sapiens
ggttcagcccggtattgaggctccttgagctggctggatggttgcgcccgccctaccccggaatgtgggcctttggagcgagcgaagtgggagggaccgacgcaggaggtgtcttgggcccgggcggctgtagaggcggcggcgcctacgggcagtggg

SEQ ID NO: 1436 - DNA, 155 bp, Homo sapiens
tggggctgaggggcgttcgagacggctccaggtcagagggagatgctggacagaaagtggagagggtagggccgccctatggggtttgagggccatttgcttccggggagatcatcgtctctggcctggggtctttctctgttggaaggtgaaaa

SEQ ID NO: 1437 - DNA, 151 bp, Homo sapiens
ctccgctgtcccgctccggctcctggggctccccgcagacgctgcttttcttgctccactgggggtgcctcttcctgggcgcccgccgcctgcatcctgctcgtcctgtctgggaatggggccgcccccgggcttgggccggcccggctgg

SEQ ID NO: 1438 - DNA, 122 bp, Homo sapiens
cgccggaggcggggctggcgcggccaggcaggcaggggatcacgtgcgcaggggcgggcgcatcgagaatctaatctgagaggtggtaggtgacggatggggtccccagctgccaaaggtcg

SEQ ID NO: 1439 - DNA, 360 bp, Homo sapiens
acccagggacgcgtggtgacttttgccctcctggaataacaagaaaatgagtgtcgcctctgtttttgtcggtccgccgcagacccgcggcccccacgtgcgcactccgatgacctttccgcctcgggtgatctgggggtgcacggcgcaacacgaccacggaggccgaaagcgcagcggaacctcccggctccaggttccggtttccgcatgcgctccgagccgctttgggcggcggccccgggaacccggagcgctaaggagaacggacctcagaggttgtctgaaggccgaggccaagatggcggtgctgtcaggtgagcgcggcaccggcggcgggtgtggggccgcgcgggtctg

SEQ ID NO: 1440 - DNA, 359 bp, Homo sapiens
gtgtaggagtaacaagtgccccccttgccgcggtcttgctaatcgcatcgccttttgagactttacgagacttctggggggccggtagctaagggagttactggatgcaactcgttctctgctgtgactgaattcccgcgcgttgtcactttggggaagtaaggtaagggtggcttcggtatttcaggctttagacatgctgcgcagacccaacctgcacttcctttccatccatcaggaccatagcaactggcatttctggcacggcccaggtgctgtcctagctgcccaagaaaacggctgggaagtctccccgcgctgccagagtcggtttggcttttggttttcttttcttaaag

SEQ ID NO: 1441 - DNA, 257 bp, Homo sapiens; identical to SEQ ID NO: 87

SEQ ID NO: 1442 - DNA, 140 bp, Homo sapiens
cctcacccttgtccctgaggctgtggagggcagtggatgggggcgttccccgagcgagctccgtgcgggaggcgaggggcagccggcagaggccccgggcgctgcggcctctcggtctcagggcgcctcccgcaggtggg

SEQ ID NO: 1443 - DNA, 672 bp, Homo sapiens
gcgggttcgtcctgaatggtagcgattcgagttgttttctgcttttcttctcccccagacagtgagtttgtggaagcctcgcccgcatcctacagcccagacgagttaggtaagtctgctcattttgtcttttatttcttggtcgcaattctgcccgagaactgcgagtttggggggcgtccataggaactcagctagggatggggctggggttggagggcggagggaaagggtcaggggacacctgctgccttcgcggccggaaccggcctttcctcggcgctgtgctttcgggggtggcagggcaagtgtccaatgagccgtgcgtgtgtgtgtgtgtgcgtgcgtgtgcgtgtgtgtgtgtgtgagtgcgtgtgtgtgcgtgttcgtctggggcagtggtgctgctccgaggagcctggcacagcaaacttccagagctggggcttctgaaacctgcgctcatcttgccgggaggacacagcggcgactggttctgacttgccaagtacctggcacgagaaggacgtcgtgtgggtcgtccttaccctgaatttaatgaagtcaggggctgaaaacggcggtgtaatcattaaactgtaagacctaggagctgcttccctccctgatttctattcctcagttagcctgtaggtgtctcgagataggaca

SEQ ID NO: 1444 - DNA, 559 bp, Homo sapiens
tttgcctatcttttttttgggggggtgcgggcagtgggaatgttctgaatcccatttaaatcttttgttttagcaggcagccacccagttagtcttagcacacaggtcctgccctacatttgtgggctgtggttccaatgacagtttaactttcagagcctttgtggtgtttgtctgcttggtggttagatgccgctagggctgccgtctcatttccccctgctgttattgctggctgtggaggcagaagggatttccctaggctgggctactaggtgtctcccagtgggggaaacgtagtctcaggaccctggagactgagggactttcctgactgtggcatagtcccccttcctgtgggggacagagagctcttgagccagacacttgttgagatggaatctctctacctgtgccccacggttttcctcatgtctgtgtgcaatggaagggcgtcttaggcccatgtgaccagagaggcttcctgggccaggtcacttgtggctggggagtcttgtgtctgccctattgcatatgtcgaggctcccctagttattgt

SEQ ID NO: 1445 - DNA, 283 bp, Homo sapiens
tgtctcagaggccccaaagccaaatcctgattgctcagcgggctggaaggcgtggcctcagccccgccccgccccgcctcaccacaaagcggttggttgcggcagggactacaccggtgtatcatgggagcggcccgggctacacgttaaaaacactaaggggagcgcgcgaagctgaacttggcgctcgatgggggccgttagccgccctagagcgcgcggagccgcagaggcgtagctggactacaacgcagtgcatctcgggaggccaactcgactggac

SEQ ID NO: 1446 - DNA, 128 bp, Homo sapiens
gagctttacaggagagagtgggagaggaggctcagagaggtcactcaggacccaaagtgtgcccagacgggccctaactacgtggcgtgacctcaggcggggcaaacagatcaaggacacagggtccc

SEQ ID NO: 1447 - DNA, 137 bp, Homo sapiens
agccgggacacaaactccgcggcccaggcgtccgggcggcaggcggatggtcgagccgggagatcggcgcttgctgcggcgctctgaccctcgctgcttccagccgagcccagtcccgagccgccgccgcctccgcc

SEQ ID NO: 1448 - DNA, 130 bp, Homo sapiens
cgctcaacgggccctacctcgttcgccatgttcacggattctggtcggcgcggggggctgacatccggggtgggccgcgcagcgacggaggcatgggcgtggcgagcgcctagcgaggggggcggggcgt

SEQ ID NO: 1449 - DNA, 137 bp, Homo sapiens
cctcatcctctgcgtacctgcggaccaggtgctcccggatgcaacccaagaacccggaacgcgcctggcacacaggaggcgctcagctcgtgttggggaattcaggcagggaagaaagcatggataggcacgaggtc

SEQ ID NO: 1450 - DNA, 189 bp, Homo sapiens
ggcctgaaattttgccaagtgaagcaccgaaaggctttcattgtttcttagtttagtaactttagctcttttcctggggacttctgttctcttgtcaacaccaaagatctcatctttgttctttgcagaccaacttcatggagttggcccacgtgtcatagcccatgacagccctgtatcaatcaggga

SEQ ID NO: 1451 - DNA, 145 bp, Homo sapiens
cgtactctccctagctttctggtctctagggcagctagataaacggaaagtctcctgggaggaataaaggacgcttagccggcccttatattccagatttggaacttcgaaaagagtacgtactgattttccaaagggttttttt

SEQ ID NO: 1452 - DNA, 179 bp, Homo sapiens
gcggctgagctccctgggcggctcggaacgcaaggggccggcgagccgacgctgctgcaggaggctgcggcgtggggcgaggttctcgctacggcttcgttcccgtcctcccgcggccgctctcccccggaagccctcggaggcagcacgatggacgtggccacactgccctccagtgg

SEQ ID NO: 1453 - DNA, 120 bp, Homo sapiens
cgggatggagactatgcgagcgcagcggctgcagcctggtgtgggcaccagcgggaggggcactctccgagcgctgcggcccggagtgactggggccgcggctgccaccgccacaccccc

SEQ ID NO: 1454 - DNA, 139 bp, Homo sapiens
atctctgtctgggccccccgatttccacaggcaaggctaccttagcccttttaaaaggcagagctgcggagggggccggattctaggaggaaccaatgaaaagcctcactcggcctccgctcctcccacttcttgctga

SEQ ID NO: 1455 - DNA, 167 bp, Homo sapiens
gcctggagtgccccagggcccttgcagtggttccgggggtgccctgggcatccccacaccgccccccacacacagcccgaattcccctccacgaaggatacagcttgaccacgtccgtgtccatccgcctcttgcccggactgggagatgacatggtgtcgccgccg

SEQ ID NO: 1456 - DNA, 151 bp, Homo sapiens
attcggatacacgccgccgcgcggctcacacccaggcacacgcctacgcactgtcactgagacacacatacctgcaggcggagacgcgatggcaacacacactccccgctggctcttcctgattttcacacatacacagacctgcaggcgg

SEQ ID NO: 1457 - DNA, 144 bp, Homo sapiens
tctgctgcacacagcccacccaggacctcccgcagcgctgacaggcggggcgggtgcaaagacggggcggggtctctgcgcccggccccctcccctgactatcaaagcagcggccggctgttggggtccaccacgccttccacc

SEQ ID NO: 1458 - DNA, 441 bp, Homo sapiens
ggacatgaatggcccaggcaaacagtgaacagaggaatgggacagtgttcttagttaggactctgaccctaacttccgggaaagtaaaccaacattcaggacgtaccggccatcggaccgcaacattcaggacgtaccggccatcagcgggtgcctgttttgcagggctgctaacccgggtccccgacacgtttctctgcccacggtagccagccccgctgtccttcggcctggacgcggtcctgtgctgccacctgcctccgaggggcagagaaagtgggagggccgggccagaatccctcccgccaaaactcctgcccggtgcggagaggcgcccggagcccagggcgctgtgcggagcgggtgtaactccccaggcctgccccgccgcctgcctccaccgtcccgcggacgcctttcctccctcccgcggcgtgggag

SEQ ID NO: 1459 - DNA, 140 bp, Homo sapiens
acttcagcaggtcctggccggaccagcattgttaacggctgcggttcgaagtggctgtgggtattgctgcggctggtgcgtcgtcgctctaggtacgttggggccgggcgagtgtcctgcgagagcggcgattggcgggg

SEQ ID NO: 1460 - DNA, 214 bp, Homo sapiens
tgaagatgaaactcatcccatgttcgtggagtttcatacagccccacctgcatcttgggtggctcacctcaaaggcggtgtggttatttttagctgcagaaggtggttccatcctctgtgtggtttgaggctgtggttccacttccccttgctgcgttgtgctgtgcagacttcgacagtggctgtacccctgtggcatgggactagttcttca

SEQ ID NO: 1461 - DNA, 130 bp, Homo sapiens
ctcctctctgacgtctggaaatctagcttccccatcactacgtccttgggtgcaggttcagagccaccgggcagcctagatgaggcaggtgagcagcggctgaagactctggaacctttgcttctctctg

SEQ ID NO: 1462 - DNA, 1175 bp, Homo sapiens
gctctcccttggccgagacaactgggcgaacgcggccgccagcacgcaatgcgcgtcctcctcgcccccaggtgaggactcggcaggggcagggatcaggctacccagcgcggcaggaaggcgcgagaagccgcagcgacttcggggtacagtccgggcgctgtccggtgaagcgcggcgtgcacgtgcatgccggtgtttgcacgagggagcgggtgtgtgagtgcggctctcccaagtgtggcatggtattgcgcgccgcgtgggttaatatggggaggggtcccccgctggtccaggactctgctgggacgcgcagggaatctcggcgccgctcgcgtgcccgcgggccctcgcgctgggcgtgcacagcctgctctactcccgcagtcgagccgctctcaggccatcctttctttgaccccagagccaggacttctcactgccgtagctgcccgccaagtgctccacctcggcagcttaggctggcgaggcgacctaaagtcccccggctcccgcgcgcgacggtcacccggtgccccgcccaggggcctcgctgccgcgttccctgcccgcccggttccagcgctggaggcccggggggagcccacccgcccaccccgcacgccgcccgcggcactcacaagtagctgccgctggacaggaggagaaagatctgcgggcaatagacggagacgagcgcgctgcgcggcgacagtagaagcatggtgggccggcgtgcctggcggggctgaacaggctccgcgggccgggcgcctgggccagctgaggccggggtccccgcggagctccccgatgcagggcggcggcgctgggcgctaggggccgggtctcgtgggcccgggcgcagttgtcgcccgtgccccgccgctagggccgcgcatggcgctgggtctggggcagcggcgggagctggggctggagtgcggggcggggacccggccgggggcagcgggcgcgccttggctgcggtctggacctccgtccgtctgtcggtgcgaaccggctctgtcgctcgctctggctcacttctccaagtctcccgaggcgcgcagctgccattggacgggccgcccctacatccgcctcctcccccggcgggtttttttaaaggggaggctgaccggagcgtgcggtgggagccgcctccaggg

SEQ ID NO: 1463 - DNA, 135 bp, Homo sapiens
gccagccggggcgggcccagcaccccggccgggcagtactttttttttttttgcatacaccagttctcaggatatcggaatccggtgcacagcagcttcttcaggtttgaggttccggatgcctgggggcggaga

SEQ ID NO: 1464 - DNA, 175 bp, Homo sapiens
ggagaggaaatggtgggggtgtgcgatttaatttcagaaaatttcggtatgggcaaaaggcgacccgtctactgcagcaagcagaatgctcagctcaaggggaagccgttcgaaggaaaatggttcccaaatgccaatggtctccccacgccctggatgtggggaccctatccag

SEQ ID NO: 1465 - DNA, 153 bp, Homo sapiens
cgagaacgacgcctagcgcccagcggcctccgcgaacaaaaagcgaccggtcggaaggtgctggcccagccgcccctggcgctcgagcccgaatccggccacagaccatgaagggacgcccggcaccacgtgcgcggggatccgcggacggga

SEQ ID NO: 1466 - DNA, 150 bp, Homo sapiens
ggaaatcaggtccggggatgaggaggtacactcagccattgggccctctctgctgccaatcagagggacatccgtcgacggccccggcctcggctcgttgattggagaaactgttcctagggtgtttgcggcgggcgggtttccgagtgc

SEQ ID NO: 1467 - DNA, 233 bp, Homo sapiens
ggcctctaccgacggtcacttacgagtatgggagacggccaacaaccggctgcaccaggagtacgtgccttccgcgcacctcagtggtacctgcacctgtctggcctgggcgccagcgcggctgcaggccaaggtaaagcgagcgggactgcgcggggcgggcgccttcccgggctcggcttcgggcctccgggccgggtggcgcgtggtccggcatcgcgcgtggctctcag

SEQ ID NO: 1468 - DNA, 146 bp, Homo sapiens
gtctcattcctgcgctgctctggaggagcgctggggtcctgcgattggagctcctgcgttgcccctggaagtctttcaaggcatccaggactggggatggcccctctttcgagggaaccccagtaacacgatctgtgcctctgggt

SEQ ID NO: 1469 - DNA, 127 bp, Homo sapiens
gcgcttgaagtcgctttgagattgaatggggtggctcgggcaatgacgtgcgtggtaggacatggggaatcctgagccggtaactctgagaagggcccttttctttcctcttttttttaatttaaat

SEQ ID NO: 1470 - DNA, 129 bp, Homo sapiens
aggacacagagacggcgggatggcgcagggacttgaggcttgagatcccgtccttcagctcaggtcccgtcgcgcttttaccccttcccggtgacctcaacccctttataccgaccccacctctttgga

SEQ ID NO: 1471 - DNA, 164 bp, Homo sapiens
taccaattgatgggtttaatatgcaaacacctctgagctactttaaaacaaacatgactaacccagaaataaacgtatccaggaaaggagaaaaacctgttaaaacacggtttctcaggtctcacatccaatgtgtgacatacatacggttctgcaccgaaagg

SEQ ID NO: 1472 - DNA, 182 bp, Homo sapiens
cacaacatcgtcccatagtctgaccagcccggtctttttgaaagcaagatgattatttttcaagccgtaaaatgtaatggcaaaaccgcaggactgcaaagtgtggtttcaggaaactgttaaaagttcacatccttatctgaccctaatcctggcggcccagaacactgtgattcaaggaa

SEQ ID NO: 1473 - DNA, 128 bp, Homo sapiens
gaggcagggcgaactctgtgcagcccctccccttttccctgaggcggaggttcggtccctccggaccggacctttgattgacaacttcgataaataatccagtcacacttccgggccctttggttggg

SEQ ID NO: 1474 - DNA, 213 bp, Homo sapiens
acgacgggctctgagggccaagttcttgtcacgaatttagtttgtttcagagcggcaggactcgtagctagagaacgaggacccacgacgcgtacgcgttacagtcctgtttccctagaaacggagctgccggcgcggaggtggctttgagattctgcgaaagacctgactgctcttcaacaattattgtgttgcaccctcccaggcgcccag

SEQ ID NO: 1475 - DNA, 144 bp, Homo sapiens
gctaactgagtttcagcccgccccatcgtgggctctcccaactagacatccagcttctgcccaccttcttccccactttcgtcccccccacagagcctgagacccggacgccagagcatggcgggaccaactccaaggccgaag

SEQ ID NO: 1476 - DNA, 220 bp, Homo sapiens
gagtgactggtcaggcagcgggcctggcacgtctaaagcttcctaggctcccacagcacgccgcctggggcacggcacccaggacggtggcagagctgacctgactcgagtgaccggcagcgtctgcagggaggatggggacgaggaaaaggctcccactgcgccgggcctcacctttgagtgaggatccagcctccccattctgctccctgagggggca

SEQ ID NO: 1477 - DNA, 138 bp, Homo sapiens
cggggagctaaccagggagaggaggtactgaagagcgactaaactggctgcagcggagagatcagcccgaaggcgtccttgaggagcatacggaactccaaggaaggagtagaataaggagcaggcagagaaaccaga

SEQ ID NO: 1478 - DNA, 140 bp, Homo sapiens
ctcttccttcccaacccctttggcttcggccagcggactgtgaaaatatcacactacgtgaggcaggcgccgcctccccataaaaaacccagaagggtgactggcaggagggaggggagaggaggaggaggaggagggag

SEQ ID NO: 1479 - DNA, 608 bp, Homo sapiens
cttcctggccctcatctggacccgcgctttctgctgccttgtggtcctctgctccagccctgggagggaacgcggctcccctgacactcgaagccagggaggcctctctctttgcctgctgggcccggtgccgctcttcagttctgccagggctgctgaggcggcacaggccagagagggaggaaccagggctgagggcaggaaccacagaggtgcagacgcgggggcggggcacaggatggaatggtggcagtgcgaaaggcgcggcggggggcggtgctgcggtcagcaccgggtgcggggatgcgccacgtgggcctgcagggcctcccggatgccgcgctgccagtctcgagccagctgcaccggggtcacggaggcctgggagcaacggtgtgggtcagtcccttgcaggcgctccacccgccctcgggtcaggagccagggctgcgcccacactcaccgcgttccgcacccccagctcggccccatagagcagcagtagcttcatggctttgtagctgccgtgccgcacggcctcgtgcagagccgtgtccccttcctgctgagaacgcaggcagtcaagcttctgcctccgcgtgctgccc

SEQ ID NO: 1480 - DNA, 282 bp, Homo sapiens
ctcgatgcactcacaagcgggtaactaggtgacaagaaaacaaagatcttattcaaaagaggtcttacagcaacccaacgtctcatcttcccatagtaaagatgacggcgccttgaggtaagctacaggcaacaccacttccgcgtttctcttgcgccctggtccaagatggcggatgaagccacgcgacgtgttgtgtctgagatcccggtgctgaagactaacgccggaccccgagatcgtgagttgtgggtgcagcgactgaaggaggaatatcagtcc

SEQ ID NO: 1481 - DNA, 143 bp, Homo sapiens
cagcgtatttcagcccccagagacatcccccacctcggccatccccagcgcctttgcagggacagcagcacaaccatagcagaggtcctgggcatcctggaaataacgtgctggtataaatgttggattgagaaaggaagaaa

SEQ ID NO: 1482 - DNA, 316 bp, Homo sapiens
cagctgccacttagccgcaaacacttactctagggctgcagcttccgcctctgtctccgctgcctccatctttccaggcgccgagttcagctgccttcccacaatccctaagattactttgaagtcacagtcgacttcgcgccggggcaggcgattggctgcagaggttagtgggcgggcatcaaggaccattgtgcgctctaattggcaggcgcggattcgctcgttggcgggcctcgctgcttggcgcaagcgcggttatggctaggcgcgcacgggctctgcgcctgcgcgctagtccttacgcggtgccaga

SEQ ID NO: 1483 - DNA, 133 bp, Homo sapiens
cccttcagatacggaatgcagcaaacccctaattttccttgaaggggccacggaaagccaaacggattcgtaacccggttgctcaatggtccattggctactgcaggacgcgccctcctcttacgccgcaggg

SEQ ID NO: 1484 - DNA, 160 bp, Homo sapiens
acgcgcaccggagcccgctccctttcagcagctcattaggggcccgagcgctgggggcggatggggggacccgtgctaccgcccccgccttcgtcctcgctgccgccgaggctccccccgcccggcgcgcgcgcaggcaccgcacccggcgctgccggcc

SEQ ID NO: 1485 - DNA, 146 bp, Homo sapiens
ggctcagctcctggaaacccgactgcagaacccccgccagcgccaccacagtcccctcgtccccctccgctgaggacgccatcttaactccgggagccccacagggaccccccagctccgcgcgccccgaatgcgggcaaaacgct

SEQ ID NO: 1486 - DNA, 1181 bp, Homo sapiens
gaagggatgagaggcctaggcctagttcgtgtccatgaagcctctccacgtggccgacttcccttagagaagtcccacaagccctcagccctcacagcctcgcccgcgacgccgtgcccacccctcccctggcagccccgagactctgggcgtgtgcttcccgctccccgagggccttaggcccagcggacgcccggccggagcctgatgccggcggcctccccctccctcagcgaggcacgcgcgtccccaggaccgccggtgccggggcctttaaccctggccgccgacgccgcggggaaaggaagcttctgcggctacagatggcgcaggccccaggtcgcagagaagccctatccaactctgcggactggccctgggagaaagggcccgggagttgcttctccagtcggtgaacgctccgttgagccacgtctatgcgcttgctcatggataagcgcactgggggactatactgcagtgtgaccgccagtgtccccagggaggctgcggaaaagtagaggcaatgagacccgagcagaaatagggacttctcgcggcagtccgcacggaagcagctggggagcatccagctcgaccctccccacaggcccagggtcgggacaccgagggaaggcgcggcgcgcgcggcaaggccaggggcgcggggctgggctcggccggcacaagtgctcggaccgcggagcgtcctcggtgaggcgttcggtatggattgggtaggagcggccctgggcgatgggcctgacgtcggtgggcgcagttgaggccactgcaaggccgctggatcccggatccgcacccgagacggagcgggggccacacgggataaccgagggggcgaacgggagtttcgggcctccgctccctctccgggtgggggacaggtcgccgagtccgaggtcgggcgcgaaggccactcgcattttcccgccttccgcgagcaacccaggggccctgcgggaggaggagagggtcccgggagtccgcccttccctgcgccttcgggaccggcaggaggcgctgcgcgggcgaattaaaagaaaaggaaaagctcgtagtggaggtgttaccgcatcctgcctttggacgctactcttagttgagtgacccgattcggaccttaggggcgttagggtctcctccaccgcctccctcccctg

SEQ ID NO: 1487 - DNA, 589 bp, Homo sapiens
agggaccttgttggttgagcacgtgcttccctgcagagggctggagggagtgaaagggcttccggctccagctgtggctgggtcagctagcaggagatgtggggaatgtgtggtgtatggccatctgtgtggtgtggcaggaaggtccggtcctggccccggctctgagttgaaacaacctggtggtcagtcctgacccagcactcgccacacctatggcccagctggcacaggagcagccaagttcaggatataaatggggtcacatgggaaccgtggaagctctgtctccactggcagcaggctacagactggggacatgggagcattgtgagagtggggacacccagggggcctgtttcaagctcctagtaccctggcggttccagtgtctttcttggttgtggccacagcaggaacagggcaaggacagcaggggtgaggttgaggcctggcaggatcctctggcccaggagagcaggcattgccctggtgggtgctgagcagtgtctgggctcccttggagctgctggcagttttgtcctgctgggtccctgctcacgatttagggtttttttgttttttcact

SEQ ID NO: 1488 - DNA, 147 bp, Homo sapiens
actgagggcgtggcccggaagggcagcctaaggtttaatcgccagagaggacgccttgctccagcgtttggctccccacggcggtcccacagcgccacctagcggcccccccgccaggagaacacgcgtccctcactacgcggagga

SEQ ID NO: 1489 - DNA, 137 bp, Homo sapiens
ccctgaagtcggccgtcgggcctaggaaatgccgcactacaacttccgtcgggctccgcggcaggtcccggaagtgcgcctcagaggcccttctttcgcatacggccgcgcccactactgctcagagattctaggaa

SEQ ID NO: 1490 - DNA, 154 bp, Homo sapiens
cgcgcggcgggcacaggtgagcggggcgccgactttggcccttaggctcgcccacatccggggatcaaggtcaagggcgagggcttccttcccctgcccccggcccccggcagccccgagcccggggatccgctgccaaagtttcaggccgggc

SEQ ID NO: 1491 - DNA, 142 bp, Homo sapiens
gggggtggccgtgtggtgtggtggcgcgcaggccacatgggatggaatgatgaggtacgaccccagcgccgcccgcccagctccgccgcaccttcgtcctgccttctgggactgacccccagctctggccacaaggacagcg

SEQ ID NO: 1492 - DNA, 251 bp, Homo sapiens
cctggcgctgcgggcggccacccccttctcgaaccagcccggctgggctgggcgcagctcgaaacgccggagaccacggcctttggctcggcgcccgtcgggcgtctgaaatccggcggggacagccacgtaccggggaggaaaggtagaagggcgcaagctcctcgggctacgctgggctactgggaggctcccactctgtcccagcacccccgggtcgcttgcagcctgggtgtcaccggcgacggtgc

SEQ ID NO: 1493 - DNA, 140 bp, Homo sapiens
acaaaggttcagtgactccctgctcagcgactttctgttttcttcctcttggacagattcccagtgatcaaatgcagtgctctcaggggaagtgggctggtctaggagcgataaagggccaattcccacagagacatcgt

SEQ ID NO: 1494 - DNA, 127 bp, Homo sapiens
taatcccactcccagaacggggaggagggtggcagtggacagaaacagcgttcgagaacccggcacctttccacgctcgcttcttcccggacccacaacacagaaaccccccaactcggaacggcgg

SEQ ID NO: 1495 - DNA, 169 bp, Homo sapiens
cggccgctggaggccctcgcgcgctctggcggagctcgggagcggggaccggtagccgactgcctctgggacagcggtggcgtctctgtgcccgtttagtggagttggagggaagctgcgaggaggcgcaggaagtccacctcagaaccccccccccggtctaggggcg

SEQ ID NO: 1496 - DNA, 949 bp, Homo sapiens
aggagcggggagcaggaggggacgcaggggagaggggactggggagcggcgagaggaggacgggagacgcggctccacctcccagctcaaaacggcgtcccagctgctcgcaaaccaactgctcgattctattcactgtcgagtaggaacaaaaaagtggctatttattagaatacttgtttggtattgttccgcgccacacaaaaggcgtttcattatgtggagggatctcctttttccagagagaaacaataacttgaaattgtctttaaagtcttttctatcaataataaatttcattttcttgtctctctcgcctgcagtgtgtgtgcgcgcgcgcgaggcgaggagagaggcgcgtgtgcgagtgagtgtgctagcgggggtgcgcgtgtgagtgtgcgcgtgtgtgtgcgtgcgcgtggcaccggcgcccgcggctacggggctggcgctgccggagccgggccggaccggggtccgagatctgcgtcgcgctgggcacgctggccacccggtccggaatgagtcggggctccgggaggtgcccgtgggcagagcgttaggggcgcggccgtgccggacccgccctggggacccgctggagctggaggaggaactaactgtaagtgtgtctcgaacttgcgcgggggcttcagcccgcccggggctgcggagctggccggtaaaggctctcgggagaggggcgcggtgtctccacggtgactttccgtgaaggaggatggggtgtctccgcagctttggggccccaggaaagaacaggtgggtagatgtggtggccacggctagcggactcgccgcggggcacatttgtcattttcttatctgtgcgttcactcctcccccatcctcggcttttgggattggccgccgcccaacggacccagactgtttctctctgggtcgccatttttggggaggggggagg

SEQ ID NO: 1497 - DNA, 152 bp, Homo sapiens
tcagctgcacggctccgaggggatggccgaggaggagccgccgccgccaacgctacccccgctcccgctcccgctcccgcgcccgctcgctgcctgctgctggcgctgctctggccgctgctcctcgcctgagctgccggcgcgagcccagg

SEQ ID NO: 1498 - DNA, 177 bp, Homo sapiens
ccgcagcatcctcgcgtggggactccggcggcaccgtgactcaggcccggaggaggggcgcgcggtgacacgaggcgccccaaactcaggccgcctcagaggatcgccagggccagcggccagaccaggatccgacctcacacactaaacgtttcaccactttaccaaccattgcag

SEQ ID NO: 1499 - DNA, 176 bp, Homo sapiens
gaggaggaatatgggcttgtgggggcaggggcagcgcccggactcctcccggggcaggactcccagaaacgcaggaagcgatgacgctgctcagataaaccctggcgctctgcgctggcgtcctggtcaggagctcctctgccacggacgcgcctgccgtttctgccttcgttatc

SEQ ID NO: 1500 - DNA, 193 bp, Homo sapiens
agccggccccaccctggcagccagctcccgggtccaaggggtgccccttctgagctgcaggctggggaggactcagcccgggccccaggctcccccacctcagcttcagggaatgccctgctttcctgccaaatcatagaacagtccctggcatcccccagacgggaagaggaagtcagggaggtccaaggct

SEQ ID NO: 1501 - DNA, 339 bp, Homo sapiens
agaaatattttaaacttggtttcagcgagctcaggagttttcttgtctgtctcgagtccttaatatctttccttctatttcagagctgcctctcgccccagagggcacaagagctgctatctgacaggagctatttctgcccagatgaaaataaaagggcccctcccccttcccacagagtgaattctttctaaaaatgtccctgcagacagccagcggcaccaaggcctgtccttggcaggtgtgcccagcaacagaggtgagtctggggtccctgcaaggcaggggcccactgaccaccctcccacccagccctgcccggcctgctgccctgcagga

SEQ ID NO: 1502 - DNA, 536 bp, Homo sapiens
gaggcatccgggcaggcctgaggagtcgggctgaaggtgcgccagccattattgcctcagacctccggacgctacgtaccccaagcacctgagctactagtggtatatcagacaagatttctgggagcagccccaggagtccctccgcccgctcccagtccgcaagcgcagaggatcctgcgctctgtcccccaaggtcttggcgtttgctgagctctctccgcgcgcgtcgaggagaggccgcctctcgtgagcaaaagctgggagttgttagagattccgcagccgctctgagggcgagatcgggtttgtcccacgacctcggcgccaggaagctgtagaaagagacagaccccaattttctccccttggagttgaaacaaaacctgaaagcccgaggttgcccgcaccgccagaggtggcgcctaggcggcgggggcgaccagagccgcgtgcccgcgcggttcccaggcctgggttctgtttcttcctattttagttagttacttagccggttagctaatagacagctcaca

SEQ ID NO: 1503 - DNA, 147 bp, Homo sapiens
atggagtggaggcttctccgggagatcaggaaaggtcgcgtcgcgcgcctcctcccggcctttgggggggtccgtccgcgtgccgtgcccccacctgttagctcctctgctcgccgcccgccgctcccgctctgctacaccggccac

SEQ ID NO: 1504 - DNA, 115 bp, Homo sapiens
taaagccctgtgagggccgcctgctcaggtccccgggtgcagaactgtggggcgttcgtgcgcggcgtcccgtttctgacacgcagtgtgatggggtggcaatggagggcaaggg

SEQ ID NO: 1505 - DNA, 136 bp, Homo sapiens
ttacctcatggtattaccaccctcattcaacagatgaggaaagctagtttcaagcaagttcactgaggatcagagacgttaaatgatttgcctaaagttagagaactaataagtgagaaagctagtcctgctgcgt

SEQ ID NO: 1506 - DNA, 213 bp, Homo sapiens
tatgggctgggatctttgtgcagacccacgttccaggacagagaatgcaaataagactcaccaactctgccacttcctgttgagtgagtttgagtaagtcacctcacttctctcaacctcagtttcctcagtggtagaatgcgagttctgataccttacaggttgcagtgaggattcccgtcaatataagggtctcagcacatggcagacacc

SEQ ID NO: 1507 - DNA, 181 bp, Homo sapiens
tgaagtgggagagttgctgcctggaccagcgaagggttagccagggaaggattcaacgaaatacaaaagccaacacagacctgaaggggaacaggcggccccagcaacaactgccaaactgtcattttgctccgcggctgaacagaaggctcgagtaatgacaaccacaaaactcatttaa

SEQ ID NO: 1508 - DNA, 136 bp, Homo sapiens
tgcgcgaggcagctcctcaatggatacaaacagcgagcgtctcaatggatacattctccgggccagccaatgagcgtgctgcggaaggggctgttgccgtggggacgggccggctggaacaggttgtgttgatgaa

SEQ ID NO: 1509 - DNA, 145 bp, Homo sapiens
ggggagggagcgcaagggggccgcgaggacgcgcgagggcggggcggggccatctgtaccgccgcttgggggtgggtgcgtttgctaagaagggcgccaagcaaacggaaaccgcgcacctctactggatcaatcaaaacagcgc

SEQ ID NO: 1510 - DNA, 90 bp, Homo sapiens
gagaaaagtttgtacagagggtggaaaggcgagagcggagctccaagcccggcagcccgagaggaagatgaacagccccaggccagagcc

SEQ ID NO: 1511 - DNA, 133 bp, Homo sapiens
atttcgtcgctgagaaatgcagcgtgtacgtcggttgtctttccttaagctgtatacacactagacggagctttcggcaatgtattcactgaggttacaagagacagggacttggggcttgttttctagattg

SEQ ID NO: 1512 - DNA, 173 bp, Homo sapiens
cgcgcaggagatctcgattggtaagcctcgcccaggacggaggggagtggccgccccggtctggcccggtgagctgcgattttacggctcacaggcccgagtctgggtacgcccagctgtgatggtcgtgagcgtcaggaagggcagtggccccagttttatggtccaaagcg

SEQ ID NO: 1513 - DNA, 143 bp, Homo sapiens
tctctgcggtgctgacttagagtcccagcgccgactgcctcacaaataatggcccccagcttctccgcgaggagaggcgcgtctgatgttttgaagccacgcaagagggtttgagccgggggactcctcctcggtgcttgccg

SEQ ID NO: 1514 - DNA, 455 bp, Homo sapiens
ctccgggaagccacgtcagcccaccggcgctgcagctgcagccgccaccagcacacggaccaggggtcgccgaggattgggaatccccgaccaggactgcgcctccagccgtgcggaccccggggccagcggggcagcggcaagtcaggcagtctgcagcaggagcgctgggcatgggcttcggcccgggttgcaggaggcgtgcaccctccggccggataggcggcgcactcagggaccaggaggccatcccaggtgagccccgccagccccagccggagcccgagctgcagctgccacctgcaagtggtgctctggctgcagcggtggcaaccccggatccagtccttccgcctcgcgcccatcagcgcggacccgggggcgacgcagtggcgaagtcgggctgtgggcccggcggcggcaccaggcggagaagcgccactcaaccccatccc

SEQ ID NO: 1515 - DNA, 105 bp, Homo sapiens
agtacggagccgggggtgtgggggacgattgccgctgcagccgccgccccactcacctccggtgtgtctgcagcccggacactaagggagatggatgaatgggtg

SEQ ID NO: 1516 - DNA, 325 bp, Homo sapiens
gggtgtgtgtgtgtgggtgtcttccagcggccctggagcctctgaagcgacagcccgctcctcagggaggcgctcctggcagccacagcccacagcaggacagccgctcagcgcgcccttgagagctgggctagggatgagtcacacttgaaccgcctgggcccactgcaggcagtcaggggtgacgctgagaggtgccgtggtctcgggtggggtgcggcttcctgcgtctgagagacgcttcctctcctgctgtcctctccctgccaggccccttctgcagcggctggcttccagacaccctgcgtccctcccttgctcgcag

SEQ ID NO: 1517 - DNA, 143 bp, Homo sapiens
agcttccagcccgccttgtatgcaaatgtagcggcgcggcgggagcgcgcggctgatacccgggactgggctgcggcggttagtcctctcccggccgccgtcgcctccgacatattgcccgcaggagctgcggcggcgaagcg

SEQ ID NO: 1518 - DNA, 311 bp, Homo sapiens
gagccaccacatccagccttggtatttcttgagcactcagaaggtaccaggcactgtgccaagtcatcttatagtcacttccttgtttaatgagaagcgctattgatgaaggaagtgctattatttccccacatagcagatgaggaaatgaaggctcggggaagtaaatgactcatccacagtcacaagccagtaggtggctgcgctgggattcactcctggtttgtctggtcccagatgctaaaccaatgccagcttccaggggaagggagaccaccgacagctgcatttttctcagagctggaagcatg

SEQ ID NO: 1519 - DNA, 141 bp, Homo sapiens
aaaggaggcagagcttccaattgcacggtgtcatttacaacctcagccgtggttgcaatagggatctcatgcctcctgctgtcttctgggcactgagcaatcttcagagaatgttcacttccggtgcttgcacagaaagga

SEQ ID NO: 1520 - DNA, 164 bp, Homo sapiens
ccccagccgccaaccctcagctgtcagcaaagcctggaggggttgagcgcccgaggcccctccacccctccctggcccccgcctcccggactcctgaccaaatgaccccccccggcaggtgtttcgcccgtgccgggttcatgctcacaagcagacaggtatgg

SEQ ID NO: 1521 - DNA, 323 bp, Homo sapiens
aaactccaccctcagccaatcaaaaccccctcccctgccgccggaccaatgaggagcagcagatgtggccgtcaggcgccgcctcaatgcctcctgggagttgtagtttagaagggagagcggaacttagaacccgggttcccctcgggtgatcccgccccctcgactccccagccaatcagcaacattagtctggttagacgctctctttgcttttccccacgagtgaccacggctagataggccgccggccagatgtggcgggggagagccggggctttgctccgggtgtgggggttttggccgacaggggttcccagaag

SEQ ID NO: 1522 - DNA, 226 bp, Homo sapiens
ctccctttctgccctccctcacccacaagcacacgcatagcgactaggacctaacgcgcctgcgtaaagtttagagtttacctcacctcagacgcgactacgacctctctgcgcatgcccctttcgggaagcgcgttccaatcgaggtcgcaatcctgtgcgtgacccttctcggcgacccggaaaaacttgtaaatataggctgggtgtttcaatagcaagcgag

SEQ ID NO: 1523 - DNA, 821 bp, Homo sapiens
tggctgtcgcccccacacatcagctcccacctctccgccacctccaacccggccgccgcctcacccccagcccgcgggggaggctccgcgcgccaatcgagtccagcgcctcccagcaagttaggagcgaagccgccgccttcgcgatcccagtcttcccgggttcccgggcggcgtccccgccacccttgcgggcggatccgggggggcgcgcagagctggagaaactttctccgccttagggtggggggcaccggtgcagatactcacgccggggtcagcgctcggagccatcctcccgctctcggccccgccgcctaggggcgtgggaagcgggcgctcgctgccgcctctgccgccggcgccgccgcctgcttgctcccagccccggtcccgggctggcctcgagcctcccgccccgacgccgcgcgctcgctttatacaactccactcgagcgcgcccggtcttatgtaaaggctggcggaggcccgcagccaatggcgcggcagctggagccgggggcccggggtggggggcgccggcgcggccaatcgcggccccgagagcccggagagccgggcgtggggagggagcgcctccccgcgctgatttaggagccgggattgcggtggcagcagccggcagccaggctggcccggcgcggcgcggcggccactggggtgggcggcggcgaaggcggcggcgagggcgggcgccccccgcgccccgccactgcgtcgcgtaaccttcaggcggcagcgaggcctggcgaggaggggagagggcgcctggctgggcgctgggggccccaggccggagg

SEQ ID NO: 1524 - DNA, 139 bp, Homo sapiens
tcccctcccccgcctcccgcggcggctggcgtcgggaaagtacagtaaaaagtccgagtgcagccgccgggcgcaggatgggatccggctcctccagctaccggcccaaggccatctacctggacatcgatggacgcat

SEQ ID NO: 1525 - DNA, 123 bp, Homo sapiens
gcggcgagcgcgcctatgacatctactcgcggctgctgcgggagcgcatcgtgtgcgtcatgggcccggtgagcgccccgcgccgggaccctccccaggactctcccaagcgcctgccgacac

SEQ ID NO: 1526 - DNA, 139 bp, Homo sapiens
agagacggaaaaaaatgtgagtgggttttctaacttgagttcggcaaatcccttaacgctggcgttgtgtgacacatcacctcccttgtacgtacccctgttgtacgatgaaataagtgtgaacacttttgaagctttt

SEQ ID NO: 1527 - DNA, 151 bp, Homo sapiens
gggcggtctcctattgtacttggcttttgaattttcgcttttgcagcacaaaggtagggctgggaaaggaggctgccgaaccgtgcttgttttcgctcagataaacgtgagaaaaagtggaggtgaggaagccagtgtaggcaaatagcga

SEQ ID NO: 1528 - DNA, 146 bp, Homo sapiens
agctcctggggccccggccttgtcactccggaggcgggaggctccggggggtcgggctgggaagatcgagccggaggccgctaggctcccaggccccggccgaggctgcgcggccgcacggtgggcaggctcgggtgttccggcaa

SEQ ID NO: 1529 - DNA, 131 bp, Homo sapiens
cagcctggatggtcccagatgcatcggctcctccctgcacctgggtcctggcagccggcacagcctccccgcaatcacccaggggcaaaacgggcccctccttggagaactaccgggaagctaaggctgca

SEQ ID NO: 1530 - DNA, 150 bp, Homo sapiens
attacaattttcagtccggtattcgcagaagtcctgtgatgttttccccttctcggcaatttacacgcgcgcacacacgcgcgggcacaggcatgaatctctatccacgggaccgcttcacgcctccccaggagagagacaggggagagg

SEQ ID NO: 1531 - DNA, 174 bp, Homo sapiens
agtctgaacccagagcctggaaaaggctgaccgcccagattgacgttgctaggcaactccggaggcgggcccagcgccaaaagaacagggcgaggcgtcgtccccgcatcccattggccgttctctgcggggccccgccctcgggggccggagctagaagctctacgcttccga

SEQ ID NO: 1532 - DNA, 462 bp, Homo sapiens
agaagtgagcttggccagaggcacgctgtttaatttcaaagtgctgctgactcaaactcatgagtcctggaggcaggtagaggcacttgtaggctgaggacccgtagagcccggtgtgccctgcccaagccccacctgggaatggagttatctctgtaaagatcttgctgcctttgagcaagcactgcaaatggggtaactggaacagccttgtcgcgtgtttccacccttcgtatgaggcaggtaccatgggtcttcaccaacagcacggcctgttgtctccaggaaatggtagcccctcacagtgctttctgtctgcttgtttagctttggcatttgaatgtgcagaatggtggactttgaaattaatgtccttctgttgactgcagaatttctgctggaaatgcagggaggctgcttgtggggttcgcgtgctgtgggaagtagggaaaatgagctggt

SEQ ID NO: 1533 - DNA, 314 bp, Homo sapiens
acgtggagaagggcgactacaatgaggcgggagtgggtgggccctgcaggtcacgtggtgcggggtggggcctgggcgagtcacgtggggacggtgcgcgctcagtgcggctgcgccggccggtagctgcagctggagcagtggcgtttggaggagactcggtgagtgtgtagggaagccgggctggggctgggaaatgccggtgcctcaacggtttaacgttttctgcgtccccgggatttccgttcaagaagagcactggtctgagaaacgtttctccttttggtacacgatcccactcaaaaactcctccc

SEQ ID NO: 1534 - DNA, 152 bp, Homo sapiens
gcgcatgcgccgcgccggctcagccccgttttcgcaagctctgcgtggtcttgggtggcgagttcgagccttagaacggccgagtgccctggaaccggtttcggctctggcgtcctcgcgtgtcctccggctccaggttacaacgtcagtat

SEQ ID NO: 1535 - DNA, 149 bp, Homo sapiens
gccgcacttagcttcaaagggcttgtaatgcctgaagaccataatagcactgacttatgataatctagttcaagttccgtttgcagaagtggatctgtcatacttccggtctaagcccagcagtattaggctgcactagagaatatgaa

SEQ ID NO: 1536 - DNA, 134 bp, Homo sapiens
agccttgccaggcagtgcctggcctggagaaggggccctgccccttccggggcaggtctccgggaggggcaggtccgcggcgtgcctccaacccggcgcctgcagccccggggcaacaaggtgtggggttttta

SEQ ID NO: 1537 - DNA, 434 bp, Homo sapiens
ttagacccggtggctaccacgtggccatggctagctgtgtccacacggcccctccgaagcgccttggccccagctgcactctcctcgcccccttcctcccagtgggaacgagccagccagcgagccctctccccacgggtggcgcccgcacccctccttgcccccgggccccggcctgtgatcgctttccagggggcaggcgagctcccgggccggcggcagagggcgggcgcctgtgatccgtggccagggagcgcgtgcgcgccgagcatctgggggcgccctcctgtgatcccccgccaggcccagctctgtggcagaggccgtacactcggcctcccgcccggcccggggcccgacgctcccgcggaaagcggcccggggcagaggatcggggaaccgggctcagcccggtgactgtggcccggcgaagt

SEQ ID NO: 1538 - DNA, 129 bp, Homo sapiens
cccgcagcccaggaccaggcttgcatggggacgggggtctgcgtccgcgtccagggtccaaacgagggcggtggacacgccggaccgcatcccgcccccaaagccggctctgggctgtgcaggaccagg

SEQ ID NO: 1539 - DNA, 209 bp, Homo sapiens
gccctccgcaggctagaggattgcggtttcccttcatctccgcggctcttattcctcccccgcaaggccgcccaccggggtacgctctcccgcgcctgcgccaattccgccccgccccgcccccatctaccgaccggatgttagcagatttcccatagtgcctcgctagtggcgggcatgataacacacgccggagggtcgcacgcggg

SEQ ID NO: 1540 - DNA, 158 bp, Homo sapiens
gccggagctgcgagcgctgaagccattcatgattttggtgacgttattccaggagtgggcgagggagggcggggcctctcggggccaagccccgcccccgcccctataaatacggcttcccgggctctttgtggggctgagtgctcagtggagagcgg

SEQ ID NO: 1541 - DNA, 180 bp, Homo sapiens
gggtcatgaggtcacttggggggtcaggcggcagccgttggagctccagccgccgttggcactgtggggcaggaagctgagttgggtaagagcctgtgtcagcttcctgtgaagctcccgggccccaccacaggcctggcagtctcctgggggacggggcaggcggtggcatgcacctgg

SEQ ID NO: 1542 - DNA, 211 bp, Homo sapiens
gcggcgtttacgcactggtaccgcgagcgctcaaagcatctctcgggaagtgctttaaggctgggaaatttactatacacttatgccgggcaaaaattggatcccacgccggggaggagaatctgctgtttcactctgtattttttcggagcctgggattttagcgtatataggaaccgcacattgctttgccaggttctcctaggcaccc

SEQ ID NO: 1543 - DNA, 142 bp, Homo sapiens
cccggcgcagcccgccagtccgcccggagcccgcccagtcgccgcgctgcacgcccggggtgaaccctctgccctcgctgggacagagggccccgcagccgtcatgctttccgccatctacacagtcctggcgggactgctg

SEQ ID NO: 1544 - DNA, 153 bp, Homo sapiens
ggccgcgtcccgggctttgtggccccgtccccagcgtcgcggagcagcgggtttgcagggtgtcaactctggggacgtgcgtgcgtgtgtgtgattgttggggaggagaaatgtgatccgcggctccgcgtccccagcggcggcgggaggaag

SEQ ID NO: 1545 - DNA, 1251 bp, Homo sapiens
gggacagaacaggaaccagggtgcccgacggggggccggggggaaacacctgtgccaaagcaagccggggccagctgtggcttcttcccttttgtttttccttggtgggtggggaatgagagcttcagttctgagtaaagaaagcgaagagagacctaccagcaggggaggcccaccagccctaggcgggaaggactcggtcacaagctttggcggaagcaccatggaaaagcctagaacgggtctgcgcccggctggtgttttaaaggggaggaaggtgcggacctgaagaggaggtggaggtggacccaggcccaccgaggggagggagggacagctcttccatagcaaatacctgtcgctgagccaggagtaaagtctggccgggaggaggacagacgcagaagaccaggggctccagcgcacagagccagtttcgccagcgatcaggtctgaggcctggattccacgaggccggtgcaagccaggagccagccccactccctcgcccagctccctccggcctggccctctgcagaagcctgatgcccacccagctgtctcaccatgggaccccaggcggtgagggtgggtagccgaggactacaggctgctgggtagctgacttccccaagaagggctgctgccatgtgatcaggacccacgcccctgacatcaacccctcccccgtgttccagagcacggagcagcccggaactctgcggcctgtggttactgactgactgctcactaacttgtttctacatgaaaccacgaatcgtgcagggttctagagaaacaaagggccgcgcgcacccgcaggcccctgcgtggaggcgaggacctaaatcaaaactgctaaggggtcaccaggcatggtgaggggcctcacgggccaaaccctccctcggcctgtccttcaagcctcagcagctctgcggagtgagcgttatcatccccattctacagataactagtttgaggctcagggtaagtgcaaacgtgctgcaagccaccagacctggtggggagcatagccaggttttagaccgggcactcctgtgcgccccccaacacccccgcacacatcctccagcgccagtgctttgagagggctctgtctcctctcaggcgctgccgtgaagcctccgcttaagtggccagagcccagacctggaggtggagtgggagaagggcaggcccaccgaggccgccgtgtgcagtgtgcgatgtgcgggaagcccgtggctt

SEQ ID NO: 1546 - DNA, 150 bp, Homo sapiens
tgcccggcgtctcaggcgcaattgtcttgagcccgctttggtgtgcgttcgcaaacatctgagggggcgccttgggaggcgagtggagtggcacgtcgccggtgtcgccctctgcacctggcacggagcgggaacccgcgcctcgcgacg

SEQ ID NO: 1547 - DNA, 432 bp, Homo sapiens
agctctcctctcgtctagtgccccccacgcaacgcctcggagaggggtgcgcggggagcgcttcgccggggtcggcctcgctccagcttttgggagggtgccttggcccctaccccagccaggtatcagtggcccccgccggtagtgtcacttgttgccactccctcgctacagacccgccagggcccggtggagtgtgcgtttctacgggagaaagggcctaatggggcgcagcgccggagtcctagctccttcctccgctgttcccctcactgacgactcgctaccgtgagggttccccgggcctgcttcctgccctccctccccgagtcgccgggagaaagggctggcagggccggggcttaggaatcacgccaaggactgggcggggcgctcgcggtaccgggaacggcgtggggatccgcacaccca

SEQ ID NO: 1548 - DNA, 315 bp, Homo sapiens
ggatcatagggctgaccagtggcaggcggtgggagggacgcggggtgcttgtgccccaggttgatcagggtgaagcagtcacatgatctctcctgtcctctttcctcattctggtttcctaaagtggtcagaggtctctgcaaaataagctaaagggagggttctgctgggtgggtggcttcggcttctgtgcagcgctcaccctgctctcccctggaacgcctggaactagggtggtcaggctggggtggaggagctcccctggaatgttccagagcttcccccactcctgccgttctgagtcaccctgcctcc

SEQ ID NO: 1549 - DNA, 141 bp, Homo sapiens
ccctcccgcccccggcccggaatgtcaggtgcgccgcgggccgggcgcgcgggtggcccaccgggcgggggcgcgatgacaaagcacaaagggactgcgcgcgaccaccatccgctcggcctgcgccagggccagcgggct

SEQ ID NO: 1550 - DNA, 876 bp, Homo sapiens
gctcttccggttttcagtctggtccgcagaggttacccataaaagaaagctgccatcacaggcagcagacctttgttctctgaccacttgataatgtcaggacgcggcaaaggaggtaagggcctggggaaagggggtgccaagcgccaccgcaaggtgctgcgcgacaacatccagggtatcaccaagccagccattcggcgccttgctcgccgcggcggcgtgaagcgcatttctggcctcatctatgaggagacccgcggagtgttgaaggtgttcctggagaacgtgatccgggacgccgtgacctacacggagcacgccaagcgcaagacggtcaccgccatggacgtggtctacgcgctcaagcgccagggccgcaccctctatggcttcggcggctaaatggcattttgaagcccagtcattctctaaaaaggccctttttagggcccctaagctttcaacaaaagagttgaaatgactgcaaactgagtctcttaatagggccattgtcagtgagttctgtcatcctattttacaagattaactcgacgccgaaaatgggctgatgactacaggtgaccttgggccgagatttttccaaggccagaagagcctctgctggccagtaacttctggcggctgcctggaaattgcctgcagccggtttaccgctcggattagtttagaaagccaaggggtctgcggtccaaataggggcgggctagataattaacttccctctggaccttcaaatacgtctcaggagataatgagtttgatgggctccactaaatgctagaacctccaggaaaacttcgtggtggctggtttaagaggacttggcgggcacagagctctgcatggggggga

SEQ ID NO: 1551 - DNA, 132 bp, Homo sapiens
cccactcacctagcccggcctccccgaaacacaaattggaatggcgttggctcccgggcacactagggggcgccagcgggcttgttttccaggatggccctaaaattctctccagcgaggagaggaccatga

SEQ ID NO: 1552 - DNA, 145 bp, Homo sapiens
tacacagaatcaaccagctccccagccctcctggttgtgtggttttcaccacgtgacttttgcagctccccaaactgagtaggcagagtcggttctcccacgtggctctgaattgaaccctcttggcttctttggtcagtggaca

SEQ ID NO: 1553 - DNA, 243 bp, Homo sapiens
tttcacccacttttgggtgggcggggcacgagcccggggcaggtcgggaggagggcccagttggcacggtagggcttccgcccggggctgcttccggcctcggccccgcttcgatgggcgtggcagagcgcaaagccgcatgggcggggtttgggagtgtgggccagcgggcctattcctccaggaagccttcccagacttccatgtttcctctgagctcccattcatccactcactccagag

SEQ ID NO: 1554 - DNA, 151 bp, Homo sapiens
gggctttcgctgcctcctccttctggccctggttgggtccgcccgcagcgagggcgtgcagacctgcgaagaagttcggaaacttttccagtggcggctgctgggagctgtcagggggctgccggattcgccgcgggcaggtaaggggcaa

SEQ ID NO: 1555 - DNA, 131 bp, Homo sapiens
tcccagcgacacggcctcccagcgccagccccgcccgtcaccgttccgcgcgggaggggcagaagcccggcgcggcgaccgcccccccagcccctagggccggccaccggcagatccaacggtggcccctt

SEQ ID NO: 1556 - DNA, 158 bp, Homo sapiens
gtgggaatactgacaagtgctttaagtagaagctaaatagagggaagggggccaaagacaaaaatatttggctggaagacgaaatcagaaaagacttcctagaggagatgacatttaagatgtgccttgaaaaacggatataactgaaggactttaac

SEQ ID NO: 1557 - DNA, 146 bp, Homo sapiens
gcccgggcggcgctgggacttgtaggccgggagcccgggcgcctccgggctgaagcccgtggccacgccaccgacgcggctccagcctgcccaggcaacgcgacggctggggacagccttggaaaaactgaaggggaaaccgaggc

SEQ ID NO: 1558 - DNA, 143 bp, Homo sapiens
cagggatgcgctgagcgatttcttcgaggtggagtcggagctgggacggtaaggcgcgggctccggctggggaagcccgcggcgtgcactgggggttgtccctctcgcagcgacggctcggagggtgcgggagcctgccttcg

SEQ ID NO: 1559 - DNA, 139 bp, Homo sapiens
ctccaagagtggaaggtgccaactgcatccctagccagggcaggagaacaaagagaggaacccacatcgtgaccacaaccatctcagccccgaacgacgctgctctcatagcgaaggtgttcagtttcaccactagagg

SEQ ID NO: 1560 - DNA, 137 bp, Homo sapiens
ctcaggtgagttcagagtgagaacgcaccgccaggcttggacaaaggcacccggcctacaccccagcggctccccgccggggcctacgtggacttcagcctccagccacagggacaagagctgctggccagggctgc

SEQ ID NO: 1561 - DNA, 155 bp, Homo sapiens
ccttgtgaatcataaaagaaaggaccacagaacgatgactggaccgttaggttactatttattacggttatcttcgctcaggcgcccccacgtgtcgatcccgagactctcggcttgcgcaggcgctctttggtgtttacagcggccgcgaagcc

SEQ ID NO: 1562 - DNA, 137 bp, Homo sapiens
gagggctcccagcgcgggcgcaccccggggacggagccacccactctcccaacaggtgtccagctggccaccggcctctcgtcgtcatcaaaacctcaggcccaggggaggtcctccagcccgggggcacctgaggc

SEQ ID NO: 1563 - DNA, 133 bp, Homo sapiens
ggaggctgggcccagggcccggggtgctcaccgggatagttcggggtcaacggcgtccacagggtccacgggttccgcgggccgagggcgaggagggcggccccggcgggcatggggccaggggagtggtggg

SEQ ID NO: 1564 - DNA, 142 bp, Homo sapiens
aggaggaggaggtggactctgccgacaccggagagaggtaagcgcagccggcagggggcttcgtgtgtctccggcgcgcaccctccgcgcgggccgggttagggcccagcgggcagcaccaaggagtcgccgcccgcctggc

SEQ ID NO: 1565 - DNA, 142 bp, Homo sapiens
ggagccggaacccactgagtaggaagtgaggagcgggagccaggaccacgggggtacctcgaagccgcggaatcgacaggggccgcaatgcccgcggctgcccgaagtccccgcagggagacgagaccccggggcggctcca

SEQ ID NO: 1566 - DNA, 150 bp, Homo sapiens; identical to SEQ ID NO: 497

SEQ ID NO: 1567 - DNA, 133 bp, Homo sapiens
cccaatgcgtgaatgtggcggtgggggcaggcggggaggtggagccagttcagcacgaggagggttaactcggcgccgccgctgggaaatctcagcgtctacagcagccaagcgtggagcagttttgaggggg

SEQ ID NO: 1568 - DNA, 138 bp, Homo sapiens
ggcaggaatcctcttctgattaaactccgaacagcaaatgcattttccgaaaagctgctggataaatgaaggcaggacgcgcctggcccgccggtgccgagcgctagaagcccgcgctgtgtgtggtgcggcgagggg

SEQ ID NO: 1569 - DNA, 151 bp, Homo sapiens
aaggagtggaacccagaagccatcttgggatgggaggaatcaatcgcgatggctccagaggttgctcctcgcgggactacccgcaaccccgcccgaccgcgcttgttcccgtgaaaccccgagcattgggccgccgcctagacggctcccg

SEQ ID NO: 1570 - DNA, 102 bp, Homo sapiens
ccctggtggtccacgtagtagaaatactcgcgggtccgcggctccggactctggccctgcgtgtaggaaacgcccccatccccgctgcaggcccgggctccc

SEQ ID NO: 1571 - DNA, 179 bp, Homo sapiens
ggtactcacgcagcaaactcagcaagcaaagcgcggtccagccccgcggcatcctgggccctgcgcgcgcgcccctgcggaccagcatccttcccgcgcggctcctagagagacgcaccgagtggaagacactactcggcttggccaggacgcgctcttcccgccccctccgcccggga

SEQ ID NO: 1572 - DNA, 774 bp, Homo sapiens
gtgtgtgtgtgtgtgtgtggacaacctctgggcgttgcgggaagtgggggtgacaatgacagttaatgccgcctcttcttgttcacttcccctttagaaatggcagggcccatgccccatctctggcctctgcatcttttggggacccactctctggggctggcagaggcaccaccttggcttcctgggctgggggaatcttccctcacatccccttcagcatgaacggcctcggctttcccggtgggtaaaacagtttaatcactgaagccgaagcacagggttgattgtacacgctccccgccagccacaggggctgacaactgcctgccccgtgaaactccagtggagacgtttcagctccacaccattcagtatgggagacgccagccccacggggctacggtgcaagcagataactgaatttcgaagtgtaggttgtgtttaatttgaatctgtttatatttcggtagccccatggggcgggtggccacagtttcagtgcagatgtaaatccggaagcctccagcacctgcagctcatagacagctctcgcccaccttctcccaggaccaagccagtcccgtccagtccagtgtctgagcagagtcagaatccacaccacccgccgcctgggctcagaaagttctgctttaagtcattatttctccactgtacgatggggaatgcggtgtgtgggggccatttacccaccaacacagcagctgtgaggcacacacggctattgaaaattcatggaaattgctgggtgtg

SEQ ID NO: 1573 - DNA, 158 bp, Homo sapiens
ttctcgctcagcgcgcggcgaccccggggaatgccgggagggcggggtgcctacgtatagggcgctgtcaggaccggaaaaggccccaccgacggcccggaaggtgtcctggggcccgaacccggtgaggcggcgcttctgtgcctgcaccgggcaca

SEQ ID NO: 1574 - DNA, 148 bp, Homo sapiens
gtgtgattatgttgcagatgtcagcagacacatgtcaagggttagtcaccagacattgccaagaaatacgaaaagagaatctgcatgcgatccaggcactaacacagcagtacgcttttattttgctggaagagcctgtggcacagcc

SEQ ID NO: 1575 - DNA, 218 bp, Homo sapiens
ccctgggagcagaactgcgtcttgtatcacctggcgcggtgaacgtgggggttgaaacgctccacgcggaaggtagagggcaggggccaagggggcgatcctggtggctgcgctttttgctatttgctgccgacggcatgcagacgagatgcaaataagcttatgaaactgtccgtcctaccccctcgctccctcctcgccccctacaccgtgttgtg

SEQ ID NO: 1576 - DNA, 160 bp, Homo sapiens
gcaggctgtgtgggtcttatccctgatctgcgcacactcatctgatctgtgtttatcattcttctagggggtggtgttgggcgctctcattttgcttcttttgaatcttatgccgtggaacttcctgcgagtcatgtggtttggcctgggcttaatatgt

SEQ ID NO: 1577 - DNA, 158 bp, Homo sapiens
cttccgaagaccttttacgacattgagtctcggagttggtctcagcgccggatccacttttcggcaaagtgacgtggacgtcaacagcaatggcggaaggagaagatgtgccgccgctgccaacgtcgagcggcgacggctggtgagtgaaagccggg

SEQ ID NO: 1578 - DNA, 141 bp, Homo sapiens
ctcttttcccatccctggggcctgagcttacccggccaggcccccaaacaggaacttgacggacttaggggaggtacggggcttcccgtctatcccgccggccccggcactcgccgtcgccgccatcgccactcaatggcc

SEQ ID NO: 1579 - DNA, 143 bp, Homo sapiens
atttaacgtttaaatgcgagggccgacctgtgacagacctggttgggagtgcacgtcgactaggatcttcctcgcctcgggcttccttggagaggccgccggctggtctgagatttgggtccagttacagtaaatccagtcaa

SEQ ID NO: 1580 - DNA, 146 bp, Homo sapiens
acgccggaaccagggcctgggttgtacgcagggcgcaggaggaggagggccgggggccgggaaccgaccggtgggcaggcgcggccgtcagccccgtttgtttctcccacagaacacagatgcgtggagtccgcgaagattcgagc

SEQ ID NO: 1581 - DNA, 131 bp, Homo sapiens
agtgggggacccgggttagcggcagcggcgggggatggaggcgcccttgggctgcaccatcgcccagaaggggtgtcaggggcagcccaggcccccgagctgcagcaaccacaaagtgcgacgacagggaa

SEQ ID NO: 1582 - DNA, 144 bp, Homo sapiens
tttctggaggcccccggcatccggaacccatgaatgccacgttctttctagcagccttcagcaatttgagggcgctttgtttcttacgttgggagagaaatccatcaggaaatcgacgcccaggatcagatgcagatcctggga

SEQ ID NO: 1583 - DNA, 180 bp, Homo sapiens
gtggagggagaggaaggaaaccacgtcgctctatgataaaagccttgcacctggtaaaaagcaacagcctgctaccactgcaggtggggcaggaagcttccagttcccattcccaagcaaagataatttgcagctgagatttgcaacaaggacccagcacggatacaaagcagagacagg

SEQ ID NO: 1584 - DNA, 141 bp, Homo sapiens
ggattggagttttaggggaaggtttgccgcttagtggggctccggcggtgggatgggtctctgccgtgagctttcgcgagccgctcttggcagcctggaatgcgaggctagctcacgcttctcttacacctctcttgccct

SEQ ID NO: 1585 - DNA, 150 bp, Homo sapiens
gaactcctgacctcgtgatccaccggcctcggcctcccacagtgctggatgacaggcgtgagcccccgcgcccggtccgtgcatttacagcacaagttcacgcttatctacaaagcatccacctctcaccgcaccttccgggaccacggg

SEQ ID NO: 1586 - DNA, 146 bp, Homo sapiens
cgttcccagtgctgacccagaatgggcaggtctgggatgggagatcccgggagagccgtgggatgggggtcagggggagcgcctgactcagccccggagtccggaagggcttcctggaggaagggacatctgagcaggggcctggc

SEQ ID NO: 1587 - DNA, 143 bp, Homo sapiens
ggacactgaggcgctctctatgggcccccgtttttgacacccgcgggatgcgctcaggagagctacaggcacagggagcggtgcaggcaaaggcctggagatgaactgagccgagaggatcgtaacctagggtccacaggcac

SEQ ID NO: 1588 - DNA, 143 bp, Homo sapiens
ccatgccgcctcaccgcgggtcctcgaactcaacgaaggcgaagggcggtcccccgcggcgattcttgaggtcgatgtcgcggatagcgccgtatttgtagaacacgtcctcaatgtccttggttcggatgtctggaggtaag

SEQ ID NO: 1589 - DNA, 142 bp, Homo sapiens
gagccgggggccagagaccggaggcggagcgggacctgtcatcccgggcgggaaacaaaagcccagtgaggacgggcgggcgcgacccgcctcgcctctgccgggagaggccggcgggggcggagagcggcgcccgcggtca

SEQ ID NO: 1590 - DNA, 218 bp, Homo sapiens
ccggggcctgttgctaagggaaaagaaagaaaggacgtggtccgtcagctattgctctccgggggcagctacttccggtccccctgggagctgtcctgcggtctacgttcccccgaggtgctgggactgcggccgcaggttccgctgtctcgggaaccgtcgtatccctcggtccggcggcggcggcggcggtagcggaggagacggtttcaggcctc

SEQ ID NO: 1591 - DNA, 140 bp, Homo sapiens; identical to SEQ ID NO: 418

SEQ ID NO: 1592 - DNA, 203 bp, Homo sapiens
cgccgccgactcctatgatgccccggcgcgttccccctataagtagcagagggcgtgacggtcacgctctagcggaggcgaagagtcgcgaacgcgcgggacttcctttccctgcccaacgttttactattaaatagatggtttcgtgtgtttatataaaagctcacttcaaaataaaagaaatgatagcaagtgttttctac

SEQ ID NO: 1593 - DNA, 154 bp, Homo sapiens
atgctttgcctagctatccatgaaggctctgaagcagttaataagaaacaacgaaaggataggctgtatcttcttgaaatgatggattcaaagtgatttcagcacgtgtgaaagccccatcctcaaagtccaaaatgtattactatgcacagcc

SEQ ID NO: 1594 - DNA, 176 bp, Homo sapiens
acttctgttgacaacttggaatgaacccacgtgactgctctctaagagtgaagggcaaagagtgaagagcatgtgagggcaggaaatgactttggaaatcacctaatccagccactcatagagagggcagagctgtctgtcgctcagagagattgagtgcctcacacagggcccca

SEQ ID NO: 1595 - DNA, 161 bp, Homo sapiens
ggctcctcttggcctctgcagccttgctggaggctgccctgcggaatctgagtgaataagggaaacagcaacagtcacgttggggaaaagctgattcggacagcgccactggttcctttaacgcacgaccctcaatgcagcgtcccacacacgggattgta

SEQ ID NO: 1596 - DNA, 145 bp, Homo sapiens
tctgcccagcggccgaagccaaggcccggggcccttgcagcatagcgagtaaggcgccccctacccaaaagggcttggcgcgcccgcggacacctgcgggttccggtgctgccgcctttcacacggcccgcggcatggcgcggag

SEQ ID NO: 1597 - DNA, 136 bp, Homo sapiens
actttcaagaaagatgcggtggaaagtcgtttgtttgtgatcaccggcgtgttggaacaccgggctggtgaaagcaaataatgctgttacctcgtcgtcatactgtcactggatacgttttcctggggtgcaggga

SEQ ID NO: 1598 - DNA, 248 bp, Homo sapiens
ccgcgcgagaacccgcgcggactgcgcctgcgccgaatccgaatcaggccccctccgcctaaccccgccccgcgctggtctgtcgtcggcgaatgcctgaatgcagcaacgtctcggatcggcagcgccaagggcagcccgagccttacgagagcggcagttggctgagcgagtctctcgcctccgtagttctcgtgtgtctttggccgcacagcctctcgggagttgtagtttccgttcaactccca

SEQ ID NO: 1599 - DNA, 151 bp, Homo sapiens
gtgtgtgtgtacgcgcgtgtgtgccaccagaggaagcagcagcaagaggcaggagcatcgatccgaaggagacagcgcggggagagggacgctaggggcagacaccctccctcctgcgcgcacacacgcgcgcgcgcacacacaccacaca

SEQ ID NO: 1600 - DNA, 154 bp, Homo sapiens
cttttctctcccggcttcgacgctcctctggttcccctctctgctcgggaggctaagtgctcgggagaggcgcgggagccaagacttatgcacccggagagggacgcggagccagcggtcgggcaaagccgcattccccgcgcttggggcctcg

SEQ ID NO: 1601 - DNA, 362 bp, Homo sapiens
cgcccatgaacaagcccagcattgcggacgggcgcgcgcagacgccagcgtggtgaagacgcgggggcgcgcgcgcggcgacgagactgccaggggacgcttcgcaacaccgagagtctcagcgtttctcgagataggtgaggctgcgcgttccggaactggtttcccggaaggagcatgtctgcgcccgcgatccgaccggaagttgcacgctgagccgcggacaccatgcagtcggatgatgtgagtctcctccggttgttcttacacccggggtttgcgcagggaattttgcccattttcggacacttagaaaacgcgtacgcagcgggtctgttgcctcgtgccgctctggatgtgag

SEQ ID NO: 1602 - DNA, 182 bp, Homo sapiens
agggcgggacaagtccgactcacctgtgaggtaaggacggggccaagacccggaaccgaaaagcaggtcacgatagcgctggaaggcctcgtcgaggactgagcagccgggctgcgcggccgagctgacatcgtactggaattgaaagttgttcgggtaaaggacgtagcgctggtcggagg

SEQ ID NO: 1603 - DNA, 493 bp, Homo sapiens
gaggtgagaagggaaaggtggtcccgtcggcgccacgctgagctctgaagcctcggtcagaagggctcctcttttggtagaacacaaacgccttccaccagggagggtcctcgaactccacccaagaactgcagggaaaccaggtatgacagtaatgcaattttaaaaagagggagaggaagaaggaaagcaggaaggatggacacaaaagaaggaaatcgaaaagagaggaaacaaaaagaattaaaggaccactctaattcttgaagggacaggaaaaagaaagaaggcgcattaagggagggagacgttgagaaggactgagaccgtggcaaagcccagggtcctgagaaacttcgcgagacagaggggcccggtggctgcccatccccatgtttgggcacatggagtcgtggctcccgctcttgagtcctgccctgggagggacagtatctgtttagatttgcgtctaaatttaaaccctgatcgtcgg

SEQ ID NO: 1604 - DNA, 306 bp, Homo sapiens
caggccgagcccacgagcccctcgaggggtgagcggcccgggcctcctggcgttctggccggctagccaagcgctggactacatttcccagaggcacggcgtccggagcgctggactacatttcccagaggcaccgctcccggagcgtagcttcatttccgttagtttgcgagatttggaggcctcgcgtggggagagggccgcgtctgtggaggagcttggctccgcacctgctgggctggcgaacccgaaattgggcttggaacccgggagccagatcttggaccctgaactgcacctctgtca

SEQ ID NO: 1605 - DNA, 152 bp, Homo sapiens
gtgcttttgagggatcctgacacctagtggctcccgctcccttctccgaagagcaccgggtcctatctgagcattcccgcgactcccagcccctgatcgcagctaagacacccattcgcgcacccggcttctcccacatcctcgtcccaggg

SEQ ID NO: 1606 - DNA, 173 bp, Homo sapiens
ggtaagtgagcagaaacgtttcttatttccatactcctggttcattattgttttgaagtacaagaaagtatagatctgtaatagattactcaagttgagagccctcttaaggtataaaggcaggatgttaatccactgagaacttacgtgatggctataggaagtggtttaga

SEQ ID NO: 1607 - DNA, 142 bp, Homo sapiens
ccgcagggtccgcctggccacccaggcgcgcaccacgacccgcactcggacgaggacacgccgacctcggacgacctggagcagttcgccaagcagttcaagcagcggcggatcaaactgggatttacccaagcggacgtgg

SEQ ID NO: 1608 - DNA, 158 bp, Homo sapiens
cctggttgcgaacaccgggtcggcgtctgtctggaagctggcagccgccgtcggggagcggtgcgaggctcctgcactgcgcgccgctaggataccctggagaaggaagctacgaagaccgactacagcagccttttgctgaggcaatttggaaaata

SEQ ID NO: 1609 - DNA, 156 bp, Homo sapiens
tgcacactgtcagggctagcctgcctgcttacgcgcgctgcggattgttgctccgttgtacctgctggggaattcacctcgttactgcttgatatcttccaccccttacaaaatcagaaaaggtaagtgtcacattctgtgttcctgctgggttta

SEQ ID NO: 1610 - DNA, 164 bp, Homo sapiens
cgctcccggcatgcaacgcgtaagactgcgacggtaccggggcggcggggaaggaccgagaggcgggaggagcagcggctcaggcgcctgcaaactggtggcctgaacgaggtagaccatgactgtggtttcagtggcgtcactcgctgggctgctcttcctga

SEQ ID NO: 1611 - DNA, 185 bp, Homo sapiens
cactacctggcttctcagaactgattcgaagcgataagttggaaagcaacaaggccgtaaaaggagtcaaatgcatacagcaggaaaccacagaaaatggctgattgcaagggaaaactctagacagtagatctgtagaaagcattcgcgacctcaggaagcataagatacagccttttaacaaa

SEQ ID NO: 1612 - DNA, 148 bp, Homo sapiens
tcctggcactgcccgatcctggagggcacttggctgcggctgtggctgtgaagggctggtgctctaggcgcctccgtggcccccgttgcctgggcacctacttcctgcctcagccacagctgcatccacgtgcgccaggggccacaag

SEQ ID NO: 1613 - DNA, 147 bp, Homo sapiens
cctcgcggtcgctcacccctgagatccctggttccactgagacgctcagcttcattcggcaactcgcggacaccaagcgccacaaattcaaatacgagatctagagacgctgggtctcaaacgtctcccagagtgaaagacagagga

SEQ ID NO: 1614 - DNA, 327 bp, Homo sapiens
gggtctctcccgccacctcagcctctctggtagtggaagaagccgccggtccagatccctcctgcctgtgggaccgctgtttccctggcaaccagatgcgcgatgcttccggtctcgcgatagcggaaagggctgtaccatccggaaatgggaccggggccggcggctgttggagccctgcgagctgggacggccggcgtgtgtccttccgtcttcgctgccgacggtgggggttgggagcgatttttcgtctttaggttggattcggaacgcggacgtctggatgcttgtgtatctctgtccctcatattgctgtgatgccttaca

SEQ ID NO: 1615 - DNA, 162 bp, Homo sapiens
caaatactgccagcttactatgcttactatgttccaggctgctgtgttggactgggggagggtagacgccaaggagacaatctgatcgcaacaggctggtgagtggtgaggcagtttcaacctccatttgaggaatacaggattctatcatcaccttccagg

SEQ ID NO: 1616 - DNA, 136 bp, Homo sapiens
gggctcagccccaagcttctgttctgttccggtgttctctcctctgccctgcagcgcatcctacaacatgagggctgcatgaccggggccagtgggaaaactttgggtgaaggaagtggagtgagatcagagtccc

SEQ ID NO: 1617 - DNA, 143 bp, Homo sapiens
ggcaggaagcggcccccgcgacctggggagctctgtagcggccaggcccgggaggcacgggcccttcggggatgacgtcacgggcgggggccccggacacgcgagccttgcgccccacagacggcggcgcagcccgccgccct

SEQ ID NO: 1618 - DNA, 147 bp, Homo sapiens
agcgggcagagtcggcgcgaatgcggcgggcagagcagcttcggcgctggcggggctcgctgacagagcaggagcctgcggagcgacgaggcgcggggcggcagccgctgaccaggcgcgggagccccagggtccgcttcgaggacg

SEQ ID NO: 1619 - DNA, 210 bp, Homo sapiens
tgtggcagctcattgcgaggctgtgcaaggcagctgaggctgctgctcgagtcccatcgacttttcacaggactcacggccccgccccgagtgatgtcagctgcctttccatccctttcccggcgatgcgaagcttgaataagctagcaacccggcagagtggcccttcattgctgtaaatgtgctcatctatagccgcatcttaccggc

SEQ ID NO: 1620 - DNA, 276 bp, Homo sapiens
cagaggccctagcaaccaggaggcggcccgcgctggttaaattctcacattataggcagggtggcgagaccccgccccggaaatgcgtgttctagctttctgtgtgcttaggtgcccgagctactgagggtctaagtccgggcagccgaagagtgtggtaggtaacggtcctcagcgcaagggtcatttcgtcgctgggaagggacggccctcgcccgcggtgatggtggtgagctatgcccgtggtcctcagggccgggacccgggcccagccca

SEQ ID NO: 1621 - DNA, 176 bp, Homo sapiens
gggtgcggtgagcgccaggcgccgcggggagttaaaaagttcgggacctgagcggtgcgtggttccgcggtggccgcctcttcctgccgcgcaggccgagggtcccgacggcgccgctcaccgctccgggactcagcctttctgggcccggcctgcggttccctcggggccgggga

SEQ ID NO: 1622 - DNA, 350 bp, Homo sapiens
aggtggcatcaagtgcagaggaaatcacgtgaatcaaggcaccactgtggaggggaagcggaggggtgttgaaggaagtgggtgaggccccagggaggagttcacaggagagggctgagaatagcccagagttggactgtgaacgcctcattctaagaagttggtgtttaattctacagaaaataggaaagcagccaaaaagttctcttctttttaacatcagaggggagcgcccatggcagcgtcccagtctgggtgggtggaatagggggttgcgggcaaaatggggaagggcacctgggcctcctgggactggcagccgagtagccgcactaacacatctctgagct

SEQ ID NO: 1623 - DNA, 519 bp, Homo sapiens
gctcaacctctcagtaccagggtgaaagtggagacgcaatctcccttggaagacgttagtctccatctctaacgctcccgagacacggttcgcaattaattatgacgtcacagccaatcgtcaacgcgaaagcctgacgctctagccggctctatctcgctgccccgccgcgggcgcagagctggcgctctagcccacggagttggttaactcctctcaccggcccctggaaagggttccaagtcctttagtacccgacgctgtctgggaattccgggcgtttcggctccttggtcgcagaggcaggaggcgtgcgtggcaggagggttcgggttatatactcctaggtcctgggacagaatagttacgacctctgggacaggaactcttctctcttttgttaataaacttccaactccctcctcagacccgaccgcatgtctgtcatggacctcgccaatacttgctccagctttcagtcggacctggatttctgttcagattgcggctcggtcctgc

SEQ ID NO: 1624 - DNA, 218 bp, Homo sapiens
agaaggtggcccaaggctgaagaccgaggtccagggaggcgcctttccaaccgtgccagagagggcaggtcgcagacgccggggctgcggggaatagaggccctcaccgcagatgccacctgccgtgccctgctctgcggccaacgccagcgctggacccggagctacccgcccccgacccggaactccctcgagtaccgcgcgagccgcttggtcgc

SEQ ID NO: 1625 - DNA, 138 bp, Homo sapiens
cgacgtgatttgaacacgcaaccttctgatctggagtcagacgcgctaccgttgcgccacgaggtctccgggacacctacgttttatttacctgtcaatctgattcatgaaaataatttcggtactggtgaagaccag

SEQ ID NO: 1626 - DNA, 285 bp, Homo sapiens
ggggacgagactgcgcggcgtcagcgtgcacgcggggcaggccgggagcgccgcgccgggccgccacacttcgcgcctgcgcgctcccgtcttacgggatggatttcgctctcaggtcccagtctcgtgcggcggggcggggaccgcagccggctgggcggggaagccctgagccggggaagtcacgtggggcgtgtccggaggcgccgcggggcctggcgggaaggggctggcgggctgctgccaggtgtacagccgcccacacacaccccggccacagccgca

SEQ ID NO: 1627 - DNA, 206 bp, Homo sapiens
ggggcgggaccttaagaattatccaatcagggacgctgggctggaaacgtccaatcaggcaagcagccggaccgaacagggcggcttctggtttggcgggtcctttgtctctcggtgcagccggagctccaggtctcctcttcactactctgtgtcctgtgctcctacaggcccagcctctgtggccctgtgacctgcaggtattg

SEQ ID NO: 1628 - DNA, 391 bp, Homo sapiens
accagaaggcctgcgggctcccgagaaaggaaaatccgtctacagtccagcggctgacatttcccagtcagccgtagcgccgcccgcttccgcctccccgcctaccccgtgggccgaccagtcccgctcccgcggggggttgtgggtatctcgaaggcgggtaaagctgcaagggaaggaagtaagggcgagcccgtcggactacgaagcgggacggaaactacaattcccagcaggccttgggcctcagtgcggccgcgaagcagagcgggctgtagagccttgcgcgcgcagtggggatggaacgttgctaggcttagcgggtctggctgctgggggcccgagcagcacgctcggagccgccgcgcgccaaagcgggaatctgggaggc

SEQ ID NO: 1629 - DNA, 250 bp, Homo sapiens
atgggcgggcctgattcttttataaccaccttatgcaaattagggctccgaaagtcgttcatttccattggtccgtgtgcggaccttgcgttttcagcaatgcgtacgtaacaacaccgactcttgacttgattggccggttctgaagccatattaggaccaatgaaaaactcgttcttgaccccacccctaggaaagcttataaaggctttcctcttggttctctttcaatcttattttgttgcgaggt

SEQ ID NO: 1630 - DNA, 155 bp, Homo sapiens; identical to SEQ ID NO: 377

SEQ ID NO: 1631 - DNA, 145 bp, Homo sapiens
ccgccacctgctgcgctggctgcgctctgccctctgcgggcccggcactcggcctctagactctgtggcgggtgggcggcggccgggaggagatgtgcccggctccctccaaaggaccctcagatctgtcagtctgcggacgcca

SEQ ID NO: 1632 - DNA, 402 bp, Homo sapiens
gggctaggggtgttgttgacggggaactccttccttttcctgcttggggagtggacctctagttccattgcctgttgcttttgggcagcagtctgagaattcaagaccctgcacagtgcaggggataggatgcaggatttccgcccaagcccagtctgctgagctgctgtcacagggcagaccttgtgtctgctttatcttggtgaagcagctgcactgagcagattgctcacacagcagcctgttccatctgtgggtaaccatgttccgaggcagcaaagagaaaccgctattgctccgtggaaataaactatctgaataaaacttcttaacgggggttgaggctgaagctgaaacgggagtcggacacgatcttggctcctgaagtctttaaaggtcagt

SEQ ID NO: 1633 - DNA, 147 bp, Homo sapiens
gtcattgacccgtgggagcgccctggggcttcgagggaacggcagccgagcccgggagactggtgttgggtacccgcgggggccggcgggttccacgtgggtggaccccgagctgagggcagggtagggtcgcggatcgctgaccta

SEQ ID NO: 1634 - DNA, 349 bp, Homo sapiens
ccttggtcttctcgccccgctggcgtccgcggtaggcttccaaggggcgtgtttgagagtctgggaccaggacctcagccagagggcgcacccagtggcacgggagcctcgcagggtccaggcgtttcacggccgccttgcggcgcatcctgtggtggtgggcgctcagccgcacatccgagtgcccggcccgctgctgctggcaggacgcggaggggcgggtggcgccgcccacagaggggtaggacaccaacacgcccgaggcgatgcagggcaccccctctgacctgagttccagccgatccccagccgcgtccagttgaggcatgcaacagtagaggtcttccaa

SEQ ID NO: 1635 - DNA, 391 bp, Homo sapiens
gctgaaagagacgcgcccccgacgggcgtttttgcatcgtcacatctgcgacttctggttaggcggaggcggccgagctgacaaccggatatgacgttaaggactgccctgtagtgcccgcggttgccagtcctctatccgacttgatcgtgcagagttggttcgcaccgcccagtgaggggaagctgttttctcgtcgattgataggctccgggtctgggtaggagaggctgccctgtatgaggtagcttgaagggccgctgacaggaggaaacgcttccgaattttccagacgtgttgacgtttgagggtgctgactacacgttaaggaactttattgtcacgcctttgggaatatactgccaggctcttcctagatatattcattctc

SEQ ID NO: 1636 - DNA, 147 bp, Homo sapiens
gagtgaagctgccgacctgcaaagcagaaagagggcggtcagcgaagagcggctgcggcttggggctagcgtcccagcgccccggggaccagggttaggtgaccccgaaccgtccctagagggacggaggagctagtcaggagcgga

SEQ ID NO: 1637 - DNA, 116 bp, Homo sapiens
aggacaatgactcggcagatctcagggcgggcgtggccctaaagctggggaacgctcgagaactttccaggggagacactgcagaggagctgggtgtccaggttaaatttggaaaa

SEQ ID NO: 1638 - DNA, 120 bp, Homo sapiens
agctgcaactgcaccccaggctgcggagcctcgtgagtccggcgtgccggggactgatggggggcggcggcaggacgtgggtgggggtgcggcggcccctcagcctttgcttgcctgccc

SEQ ID NO: 1639 - DNA, 139 bp, Homo sapiens
cacagtctccaggcgggaagaggacttccttcttcgtgatcaatatttgcgtagcactttgcaagtgttttcgggttcatcattgcatgtaagcatcctaggatcccattcttaatcctatcgcctgaagaaggcagag

SEQ ID NO: 1640 - DNA, 134 bp, Homo sapiens
ctgccgctcagttcctggcgagcgaagaggggcgctcccgctccggcttcgcgaagcaacctgagcgccccaccgggagcagctcccgcgccgccgcccggccctagcccctgcccggacgctctcccctccgg

SEQ ID NO: 1641 - DNA, 252 bp, Homo sapiens
actgtggaagggttgttcttttggtctgcgaagtaaatcttattgccgctaactatttgggtccatgctacctttatgagctgtaacactcaccgcgaaggtctgcatcttcactcctgaaaccagcgagaccacaaacccacagggagggatgaacaactccggacacgccacgtttatgaactgtaacactgactgcgaaggtctgcagctttactcctgaggccagcaagaccacgaacccaccggaag

SEQ ID NO: 1642 - DNA, 548 bp, Homo sapiens
caacaaaaccaaaaatactacaaaccacacggtgtaactacgcaaccatccagagtggtgctgagtgagattgagtcctgcctgccgggctcctctgtggctgaggcagaatgtgaggcacacagcacacgacgaggcacctgggccctgctgtggggtcccaggggtctggttcctagagctcctgaggcctcggagcaaccctcctgggagaacagacccaggctcctgctggctacagtgagctcgatcctgaacccaggtgcgcctaagctccgggtttgtcccggccacggcacccactgggaatggggatgtttttctcaaatgccaccacccttctgaatttttggacccaggggccctctcctttcaacccaggaatctgtgtgagtaccatcaaaacagaaaacaaagtcgcaggtctcccctttttaaggcaaagaaagcaaggcaatttagagcacaggttctggagtgaaagagagctgggttcgaatcccagctctgccacttaccggctgtgtgacctcagtggagtctcttaa

SEQ ID NO: 1643 - DNA, 139 bp, Homo sapiens
tcgtcctggagggccgggggcgcggggtccggacgcccctctcacgcgtgtcctgaatgcgggccacccggggacgagtctcgtccagctctgtcctgacccaggagacccggggacccggctcggagtttgcagcgcc

SEQ ID NO: 1644 - DNA, 132 bp, Homo sapiens
acctgtctccttcctcatggcctcatccggccccaccaagttccttgtggtcccctaaacctcctcaggccggcagcgccatctcctgggtgggtttacctccctggctcctcctggaaaatcgctactcac

SEQ ID NO: 1645 - DNA, 141 bp, Homo sapiens
gtccaccgtcggggcgcctcccacgcacgctgctgcggggggcctgggccacgcaggggtcgggtgtggggggtcccgggcaggtggtagcggcgtctccgcgctctgtacactaaccactacaggggcgctccgacgttc

SEQ ID NO: 1646 - DNA, 141 bp, Homo sapiens
agagccgggacccgcccacgcctcctcactgctgctcgagggtaggcaggagcacgcggaccccgtgggggctgaagcggggctctgctgcccgccctgcgcaagctcccggctctggttgctggtccacaaaatcgggag

SEQ ID NO: 1647 - DNA, 470 bp, Homo sapiens
cctcatgaagtcagcaggccgctcccggctctgtcctgaccagcagcgtggggcagggtgggcaaggagggaggcacagtcagggtttatacactcagggtgcagcccttcctgcagaataagtgacgcgtttcatctggaggagacacagaagggtccgtttccaccccatgactctgcagatgcgccactgacagtgtgtggtttccttcttggcagcgtccagctctccggcaagtggctgcagatcaaagaaagcagcggaaacctctaggggacacagcctcccagggactgtgaagctgaacagggcgtggcgggaggagccctggctgacagaaatgcaccccctccccttttccagggtcaagccccactcccagccctgtgggaggagggagcaggaagaacccagtgtgtggcgccagagtgcctggctcgaaattaatcctggttcccactgtgtggcc

SEQ ID NO: 1648 - DNA, 141 bp, Homo sapiens
tggtcgctggattcccaccctacaggagcacagctagtacactgaacagtctggaaggtgttggcacctgccatttcgcgggacactggcaccattttataaaacagtgatagaaagatgcggaataaatcagtgttccta

SEQ ID NO: 1649 - DNA, 148 bp, Homo sapiens
agggtcacctccgcgccgcggctcctcaggtcccggggagtcgccaggagtggcttgccggtggccgtgggaatgagcgtgtcccgaggcggcagctgctgcgcgggataaacccggaagaagccgcgagacggactgaagtcggcca

SEQ ID NO: 1650 - DNA, 146 bp, Homo sapiens
agagggtgctggataagatcagtggtaactacaggaagtctagccctcatggattaattaagtaacgttgacatggtgaaaagaacagctgcgtttctgagtcttgccaagatctgcttggacattgtagaaaaacaacactttaa

SEQ ID NO: 1651 - DNA, 952 bp, Homo sapiens
gtcttttttctgcaggaccaccgtcttctcctcaataatgcagtcactgtagagagaattccggggacagcgaccattattgtagcccgtcatcatcaccgcggccgctcctccgccggggacgttcatcatcatagccaattaatcaccccagctcgccagatccaggcagcatggaggaaaggaggcagcgagggtgcaggaggagcgaaggaagaggggggtggctaccgggataggcgagcgtggcacaatgagacttgcagggtgggggcaggcagagccggagccagccggaggaaggagtcatacatggtggggcggctgcctgagggatggctgagctggaggctcaaggggggctggccaggacgccgcccagggcaaagaaagtaagtggcccgaacggcggcggcggcagcggcggcctcagcagcggcggcgtcgggaatgagctcctccggcttgtcccgaccacacgcatcttccagggaagcccgggaaaatcagccagaggagaaatgaggcagcagttttgttttgcttttccttgaagggggtttaaaataaaatcaaatcctatctgctccccgcacgagccggcagcaggcaccagagacgcagggacctgcgcgtcgcatccagcgccccctccctctcccgtcccggcgccggcggtgtgcggcaggcaggagcccccacaatcatctgacgagcccacagtgcgcccggcggctgcctgggcgtcatcccgcgcgagcatccgcaggctgggctgggagagggcggggagggggagcggctggggctctctctgcatccccccctccagcgtccccccggtcccttgcagccttggaaggtggccggtggccggtcggggaggggtgggggctccctggcagaggactcaggacatttcggtgttaaagcccctgaggacaccagcccc

SEQ ID NO: 1652 - DNA, 281 bp, Homo sapiens
ggtcctcctcccagatcacctgaaatccgtccctccagccccgccacctacgtgctccaggcctgtctgggcgccgccatcttgccccgcagagatcgcgtttccgccgccgccagattccagcttccgccccgcagcccagccccgcctctcccggtcttatctcggagcattctgggctttgcttgttcagtgcagcggactggtgagcgcggtgctgcgcggctggcggtttattacccccacgtaagctctataccatcacccagaacacacatcct

SEQ ID NO: 1653 - DNA, 1556 bp, Homo sapiens
cagagaacacctggcaggtcactcgttcacgcaagagcaaagaatgatcaagattgctacaaggcagagagatcttgcagcaccaagattttgtagcaatccttcatgccccttgccctggctcccagcatgtcgagcatgcgcacctctgtgcaagcctgagaggccgcgtagagctgggactgggtctatattgaaggatcctcctccatatcccaccccgggctgtgggatccccttgggaagcgcaggttctaacccgggggcctggtcctaggcctgggggttggagccagaaggcaagagtgagccgatgcggattcgcgctggcgctgaacgctgagcgcaggcggggaggctcggcactctccgacctcagtagcgcccccaaaaccgaagtccagccggccagagaggacacttacgtgcacacggtcttgatgttcgtcttgtcgtccaggccctgcgggtagttggccatgctgtcgcccagcttgagcaaacagtccgaaaagcccttgaagaccgcatcgcacttgcccgctgctctcacggcctgcaccagatacgctgcggggaggagggaacaccggtcagcagcgccacgaccccgccctgccgcccactgccctttcctgcgagaccctggctccgcgcggcctcatcgcatcgggcggcctctcccagcgcccagcctcggggctcgccagtgttaaaggtgaatgaaagacgtgacccaggaatgcccgacctgcagctaacgctgcgtctagtgcaaattgtcggtgtgtgagcaggtgtgggtgggtgggaggtaggtgagtccattcctttcctccagctccctcccgcatctcgctccgtatctttttctgtttccatcgccccctcttctcacctccctcatcccttttatttctctttctcctcgctccctccttcgtctcccaacacttccccagcaagccctgtcacagctctcgcaatgcgatcttccattttgaggtgacagaaggggtctcggctgcagcgtgcgggggcgagaacggggtggggagacgacagggcgtggggtcacgcagctgaacccaacgccacatcacgagaataagcctcaggcttggcgctctgtccttggtgggcgctcagcaaacactgctgaatgaatgaacgaatatagtccctggaagccaccagcagttaccgaaatggattgtttcattataaaaccgattgcctaccgtggactctgtattccgagtgagaccctcggatgcaccctctcccgccccgctggaaagagggcagcctggacgtcctgagacctggcgcggatgatgagtggtctggagaggagaaggccagaggccgggcggggtcacggatgagtctgcctgggtcacctccgcaaaggccaaatccacgaacctcgggcctctttctctcctcctcccctgtccgccactcggctccccagacacccttaacaacccacccgcccgccaaaaagcccgcctacactccggacggcagcggggagaggctgttcttctcca

SEQ ID NO: 1654 - DNA, 142 bp, Homo sapiens
aagaaggaaaggacaatggctaaggtgtgtgataaggttacatcctgcttgacccaccgtgtttcctggaacagaaccacttgggcttgggcccgagttcacttaaagtgagatggaatgaggcaaaatgatgttcctgatc

SEQ ID NO: 1655 - DNA, 148 bp, Homo sapiens
ggcgtagcggcccaggcagccccttaacggtccggtccgcgttcggaaccggcccggcgtcgcgaggggaatcggcgagccgagggcgcgggagcctctttactgcacactcatcctccgtcctcccgcccggctcaggggttacaaa

SEQ ID NO: 1656 - DNA, 276 bp, Homo sapiens
atagcgccgccgcagttccccggagacagaagtagagccggaccgccggaaaccgtagatccggggaggtcggggccgcggtgaactccagttcaccaggacaggaagtgacagcggaacgccggaaaccgcagatccacggaggtcagggccgcggagagctgtagttccccggaaccggaagtgatggcggacctccggaaaccgtagattccgggcggtcggagccgccgggagctgtagttctcccgcggctcagagaagtaggcagagagc

SEQ ID NO: 1657 - DNA, 143 bp, Homo sapiens
aggggaaggccggagaatgggctgggaggctgcgtttcggagcttagggttctgtccctgcgatcgccgcgtctccctcccttggtgggcgcggctcccgggaagcggctcgtctcgtctcccctcacaggccgggttcccgt

SEQ ID NO: 1658 - DNA, 410 bp, Homo sapiens
tagcctttatgggcctccgttttttctgtaaaatgggagtaataaaggtacgtacttcacatgattaagggagataatgtatgtaaatagtctctagtagtgcctggaaaatagggaaatgctcagataatatcagctcttcgcctagctgtgtattactatgtgacagacctccctaaagctcagtggctcccaacagcagtgacttctcatctcagtattctgtggtttggctcagtgcctgggtttcagctgcacgtggtgtactatctgagatggcacactcctgccttgtgttcagctgtgagctcggcccagccgggacgtcaagatgctgtctccacctagtggctcatcattcattaatccagcccaagcttcctcacacagggtgggcagctggactccaa

SEQ ID NO: 1659 - DNA, 212 bp, Homo sapiens
tcagtttgttccgctgtttgaaattggcgccggcggagcgttaaggtcacgtgacggaacgtcgccaatcggcgccggccttgtctcggcattccgggctcgaaggctgtgcggtctgccaggagctgcggccccgtccggcccgggctggtaaggcggaccgcaggccggcttgtgggggaagaagtggccgtggggccggggaggggccg

SEQ ID NO: 1660 - DNA, 279 bp, Homo sapiens
gccgagttgggccccaggccgcagagagcatccaggactcggagagcggcgggcacaggggctgggccatggcagcggcggcgcgtctgggggccggcggccggcggccgctttatgccgagcccgaggtgtgaagtggccccttccaggccgcatcagcacatcaaagtgggctcggggcttggagggggcggagcctgaccctttgaatccacggcggggggccaaggtgccagccccttgactgcgcctgtttcgccccacctgggccctcgcttg

SEQ ID NO: 1661 - DNA, 149 bp, Homo sapiens
cctcctcagccagccatgctggagcatctgagctcgctgcccacgcagatggtgagggcgcaacccggggacctctgcacgccgttcttgtgcctggcagcttcgaagcccatgttggagcaccgacccggtgctgcgctgttccgggc

SEQ ID NO: 1662 - DNA, 257 bp, Homo sapiens
cgcgcccagaccccaaggcggcgagggacttgcgggtttgcggcgagtggtccagaccgcggggcggaagtgaggggcgcggccgcgcgtccggggcgcgtctacccctcgctcccactcggctccgcgccgcgaccacgcgccgccctcctcgttctagaggcagcccgccagggcggggaccactcacccgcttccccggcgaccctagtccactccttggcctggcaaccggcggcttccgcggggcgggcccg

SEQ ID NO: 1663 - DNA, 184 bp, Homo sapiens
ccagttttactactcaggtgagtgttccggggctccatctggctccgcacaggaccctgtctccctgtcctgccctgctgccctgcccatctgtgtgcctggcacacacgtttctcttccccacttcctttgggggtgtgcttcactgcgggtcgctaacaggatgtctagtgttcagtggtgg

SEQ ID NO: 1664 - DNA, 421 bp, Homo sapiens
ccagaaacggcgggcggtcctgcaacgtgcaggcgccaggtccaagcccggactcccctcttcacccacctgccaaagccgcaaattccgcagctggtgtccttcaacgaatgtaaccacctctcggcccggccggaagaagccacctcccccgcacgcgtttagccggcccccgcgattcggcctaatgcgacgattggctatggctccaaatcccgcccttccgattcctgtctctaggtcacctccgcaacacagcaacggaagtagggtgttgagcccgcccacacttccggaagaattgcactggactgtgggtatcctggtctccgcgtgtgtgagtaccgcggcgcgaggttagtggtagctgggtgcagacgccgtggcgctggtgagtaaaggcagaggcgaaaaaggagga

SEQ ID NO: 1665 - DNA, 167 bp, Homo sapiens
ccaattatcacaggcaccggcccaggagaggtgagaagaggaagaaaaacactgtgttctttgagaagtgactccttctgcatttgtttggcaccaagaaaaagccacagagatctgggtgcgcctcatgtcggtcccttgtccatgaaatgatgggcaatctgttg

SEQ ID NO: 1666 - DNA, 139 bp, Homo sapiens
agtcggagtccccgctgggccagagcggtctcgcgctgcagcccccggcgcgccccctgcaggtgggcggtcctcacggtggctcgggctgctctgagtcagagactccgggaaagcctgctctgaattagggaaagca

SEQ ID NO: 1667 - DNA, 138 bp, Homo sapiens
tctggtggctggtactgactgttggctgggttgccttctgcaaccacgtagcaatggaacagttccaagaggcaaaagcagaagctgcaaggcatcctgggtaaggccacggtttgaatgtttgtgtcccctccaaaa

SEQ ID NO: 1668 - DNA, 167 bp, Homo sapiens
ccctgtcggccgccgccagtccccgccccgactgtgaatgaaaggcgggcgccgccgagggctggctgggaacgccgcagcgacgccggcctctcgagaggcgcgcgccccgccgagatgtacggtaaggagggctccgcgcccgggcccgggcccgcgggggcgac

SEQ ID NO: 1669 - DNA, 133 bp, Homo sapiens
cctcttaatgtcccctcgcgcctgagcagctccggtcccgccggcgcagggtgcgggtacccgggccatgccggcccagagaccgccgcccccggtaccgctgcccactcgaagcccctggacgaccccgccg

SEQ ID NO: 1670 - DNA, 258 bp, Homo sapiens
agggaggagcgagagagggaggatcccggcgccagcaagggcgtagtgcgcactgcctcctgggagatgtagctcctcgaggcgcgctctcgcccctcatcccggaaaggaagactctgaatgactacaactcccagtactgaagaggctgctcttgcgaggaggcggtggggacaggctacggaggatttcgggacttggagtttttgcattgagtgtggtgtccgcaggtttcagcacgttcttttgggttgtaac

SEQ ID NO: 1671 - DNA, 142 bp, Homo sapiens
gccgggcgggaggtgatggcggaggcgaaggggcgacgggacctgggcctggcccgtgtgtgtcctcagaggcctggcgccggccgtcgctgtacggtgagccccagggaggcggatctgggccccgagaaggacacccacc

SEQ ID NO: 1672 - DNA, 154 bp, Homo sapiens
cacacagctccgtctgagctgcctcaaaccctgcgtggaatgaagtagggtataaatgagtaaacacatacatacagccatgggggtgtggtgtcagacagacctgtctgccggttaccagctctgggacatttgccaagttacaacttctcta

SEQ ID NO: 1673 - DNA, 177 bp, Homo sapiens
ggcagcgataggctttcggagacgccagtctctgccaggcccagtcagtcggccaatagacccggaacctgagggatcggaatcctggtccactccgcagaggcccgagcgggctcgcgagggaacgggttctccgagtctggccgggtaagccctttccagcacgcctagtattag

SEQ ID NO: 1674 - DNA, 147 bp, Homo sapiens
gctcggagggctcctgatgggaatggggtatatattttttcggtttcggaatcacctctgcgctgacctccgcgtaggccgcacggcctaggcctcggagggccgctcgccgcctgctttctccgcagcccacccttgcggtcactc

SEQ ID NO: 1675 - DNA, 88 bp, Homo sapiens
aggcagtcaccgcagaccgcccgggagcggggaacggccgccatctgctggcggctgcgctcactgcacgccttcgtctccctagacc

SEQ ID NO: 1676 - DNA, 140 bp, Homo sapiens
gttggcgcgcatgcgccccgcgcgccccgcactgacatggccgtcgcccggttccgcgcgtccgccgcgcgccggccgttaataggcttgctccctgagcgccccgcaccgacatggcggccgtcttcgctgtggtgact

SEQ ID NO: 1677 - DNA, 140 bp, Homo sapiens
atcccgtttgcacccacgcgaggacttctgctcccggtaaaggggctccatcatccttttacacgctcaggtccacagcgtcgcagggccctcgcaatggcttgggaaaccgctgaccacacggctcctattcccagcag

SEQ ID NO: 1678 - DNA, 150 bp, Homo sapiens; identical to SEQ ID NO: 387

SEQ ID NO: 1679 - DNA, 415 bp, Homo sapiens
gatggaggcggcggctccctaaaccacttttcgtgttcatccgcctccatccgagatcgaaacgggacctcgtcggccccgtaggggcccgacaagaagagggaatccctgcagaccaacagcgggctatattgacgacggtgtctgagatcggggaccgtcttttgaagagtcagtccctccttagttgcccgcctcagctgaggccgccgccattttcttgctgtccgccgtctgcagagcgcgccaagctgcccggagctctccgagaggccccaaagagactgctttcgtgccggccaggcagggggtttgtcgcctggaggcccaagaggaacggcctccccccaacttagcgggttatgctggaccgggcggtgaggggaaccgaggccacccggactttccgcggctg

SEQ ID NO: 1680 - DNA, 205 bp, Homo sapiens
agaaagagaagcgttgccttctgggtaagtcatagaggacaagctgggcccagtccgcaggcgcgttacgtcacatcgcgaacagagaaaggccgcttgcgcaggcgcagttctgacgactgccgttcagcacctgcgtaagcacctctcggccagggtgaggccaatggagtaggcggggcattttgcgtgctacattctaaga

SEQ ID NO: 1681 - DNA, 143 bp, Homo sapiens
actcccaagcgggggcggggatcggcaaaggatccagatcattcggcctgcggaagtctaaagggtcatttagacacccgcctaagaacctgaaactaccaggactgaccgcggtcaaaatccctcgggagcagtgaagaatt

SEQ ID NO: 1682 - DNA, 272 bp, Homo sapiens
agttttgtttcttcttgggggctcggcccagacagccacagtagtgaactccccctgaggagcctagcaggaggttcgtggcaggaaagtttgtggcaggaaagcctgataacccacaaaccctagaaattggagtcttgactttgatgacacctcatctgatctgtatggttggggacagaaaggcctcacataaggaaactcctggagaatcataagccctcagagcccttggtaaaacctgttcattttacggatggggagactgaggc

SEQ ID NO: 1683 - DNA, 278 bp, Homo sapiens
catcgctatgcatgctggccttgggatgggggcgcaaagcccctggacgcgccccgcctagtgggcgggaacgactacagcccccagcatgacccgcggccgcccatgccacgccccgccacgcgtgcgcttaggcgccgctgagcgctgactgggtgcgagtggggaagctgctaacccgacccggattggcgctgaggtggcccgtggggcaggtgagtgcggggcgggagtcagcggagacccaccggcgcctacaagttcccctcaggcggggg

SEQ ID NO: 1684 - DNA, 176 bp, Homo sapiens
tacacataaacacacggaaagatgggggaggggagcgagtggagagagagagacacacggatatagaccgacgagagtcaatgcgagtcaagttaacgctttctccgccccgatgcacaagtacccccctcccgtgttaattaattccaaacaaagcaagccaatcaagaaatgca

SEQ ID NO: 1685 - DNA, 314 bp, Homo sapiens
tcaggtcggtcgcctgtcagtcggcgccgagaagagactgttggggcgctggggccgggcctcgcggagcgccagagtgcgctctcgctggctgacagcctatctcgggagccagaggaggccccgggctttgtcctgcctggtggtgctggggtttcgcatcctggacagcttccccagacagtgtttggaattcagggaaggaagaaagtacgtgcgcccccatttaaccctcgggacctggcgaaatcctgctacgtgggtagtgaacattgtatcggggactgaaggaaatgcttgtaaagagtgttagt

SEQ ID NO: 1686 - DNA, 144 bp, Homo sapiens
gtgtgtgtgcgcgcgcgtgtccctctctctccccccgtctctcgctcgcccgctcgctcgcgctccccgtgttgctctcaaggacgaggtgaaatccctttgctggtcatgaggcggcttcagagacaaacaacacaatgcgag

SEQ ID NO: 1687 - DNA, 301 bp, Homo sapiens
tcccgcacgccaggtgagcccacacactgagcggacattggggcaggcaggcaggcgccggggggcggggccagcgtcgccccgccccgtcctgcctcgccctgttcgcgcgtccgctgtccggcctccggtcacgtgacagcagcgcaggtgagcgccgcttccggggtcgggcgcctggatagctgccggctccggcttccacttggtcggttgcgcgggagactatggcgtcctcctcggtcccaccagccacggtatcggcggcgacagcaggccccggcccaggtttcggcttcgc

SEQ ID NO: 1688 - DNA, 216 bp, Homo sapiens
tctttgtagttaagagcaggtgctgcaaacggactgcatttgttggggttgctcagcaggaaattgggggggcagtgagtgactcaccaaaactgagggatacgaaaggacaatagaataacaacagagaaaaacatgaagacagaaaggtaagaaaaaagatggttcttaaagtaaaaactagtttggacgtttggctgaagaattaatttacag

SEQ ID NO: 1689 - DNA, 164 bp, Homo sapiens
cctgcgtcaggaccctgcaggacgcgggccgaggctcccagctgccggccatgccctcggctcctctcccgacacgcgccagcactgccccctgctggcctcccgggagcactgcccgctgccgcggcgggaggagacccgggaagaagccgggaccgcgagca

SEQ ID NO: 1690 - DNA, 329 bp, Homo sapiens
ccgcgactcagccggggctgtgtaaaccctccctgcctgttcccaggctagtctggctcctcgcctccttcctcccgaccgcggagcacgtgcactttacctgcgcacttgcagatctttctccaggagtgagtttaaggtccgcacctccgctctggatggtgagcggagcacagccttcgaagtaagaactcagagggagctcggcgctcccgcagcgggtcccccacccaggcacgcccccggcccggccccgcccacagcactccccactcggccccgcccacagtgcggccacgcccgtagcacgcccctcccggccacgccca

SEQ ID NO: 1691 - DNA, 242 bp, Homo sapiens
aaaagtaataaaaatcgtgaaccccaccagggaggaaggtccaaaccacaggcatagattgatgacaaagctgcttccttctctggcaacagtaaacagtacccttggggtgagttgtagcagaagttcatatgttttaaaatgagcagtggttttcttgagcgatgtaggtgggtcaggtagcataaaatagatttaatttgatcctcgttcttgttttgattaagttaatagtgcttcgt

SEQ ID NO: 1692 - DNA, 149 bp, Homo sapiens
tgtgatgtccccgttgcacaggggggaaagccgagaccccagagggagagcagcccctatggccagaagccctcggatccggacgtcgggggctctaaactgagtaaatacataggaaacttctccgctaggttttgcaggatgttaag

SEQ ID NO: 1693 - DNA, 146 bp, Homo sapiens
cgcgtggtggccggggcatcccgacgaaggtgttgggacccggactgcgtgtcccgacgctgggctgtgctactgcccgcgcccgtgcggctccagctggtgcgttctcccttccgcgctcacagactttgacagcgcggggatgg

SEQ ID NO: 1694 - DNA, 142 bp, Homo sapiens
agcagaagttgtactttaaacaggaagttttcaacctccttaggcttctgaagtctgttccaggaacaccccgcctggcgttctgcaaacattctgggcttcagagaatccttgtgggatgctcagtgttgacagaaagcac

SEQ ID NO: 1695 - DNA, 151 bp, Homo sapiens
ctgggaggaggctgaaagggggcaggggaaccaggaggcctggcgacctggggactctccccagtgactggctcctttaagatgggctgagtgacacctgtgacacacgtcctaagacacaaagactcgcctcctgccctgagaagtaggg

SEQ ID NO: 1696 - DNA, 178 bp, Homo sapiens
cgctcctcttaccgataaacttgaagcgactcatgactgcgcatggaggacctccccagcggaagcggaagtggccgccggcaactccgcccttccggctggccccgctcagtcacccgcagcaggcgtgcagtttcccggctctccgcgcggccggggaaggtcagcgccgtaatgg

SEQ ID NO: 1697 - DNA, 139 bp, Homo sapiens
ggggcggtgccgcgcgggcggcgggggagggggcggtgactcagccgccctccgcccgcctccccggaactttgcagcagctggagccgccgttgctacaggaaccgaatgcttttgttccccaatgtcagggctgccg

SEQ ID NO: 1698 - DNA, 140 bp, Homo sapiens
gaggggccaattcagtaagttatctttccttaaagtctttgttcctttgaccattgcggccttcttattgttgaaggatcacgaacttcaggagtcttgatgtacactactttcactttcattcttctgaataacaaatg

SEQ ID NO: 1699 - DNA, 141 bp, Homo sapiens
cggcgctccgagctctcgcgagacgctccgcagttgaaacgggatcgccatgcgctcgggcctggggggctgcctttccgggcatccgcaggccccaacctttagggaaggcgcacagtgtggatattcgccctgaggctg

SEQ ID NO: 1700 - DNA, 108 bp, Homo sapiens
gcgaggaacggcccggaggactgggctcaagtgggtggaaagctcatgcaagtacgcagccaaacatccctggccgcgcgcggtccgacaccggcggccgcccggtct

SEQ ID NO: 1701 - DNA, 241 bp, Homo sapiens
ggaggttggtggtgaggaagttccttactttgatctttggaaatcccttgttcctggtggcacctccaaagccgtgagtagccacagctcaccacccgggactttgctgcattccaagtgtagcgtttggagactaacgagttgtggtttggcggtttgagtctggaaaatcgccaaacgttttcatattttacacccacgttttcacagcacgcctgtacgtgtccttagtctttgggag

SEQ ID NO: 1702 - DNA, 134 bp, Homo sapiens
tgactcttgctcaggcttcacagtcagagtaggttctacttctcacttgaggcccgcccccagatccccagcccaccaggatttcccttcagtggcgcttgcattgaaggctacttctttggctccaagcacaa

SEQ ID NO: 1703 - DNA, 163 bp, Homo sapiens
aaggcgccgagggctggtcgagttctcccctttccaagaaccagccgaatctccctcccgcagatctgaggggcagagccgcccatccggcggcgccgggccacttctgggcgcgccacccgccgcccgcccaggctcggggagacagcgccctgagtcccgg

SEQ ID NO: 1704 - DNA, 1046 bp, Homo sapiens
cagctcgtcctcaggtggtcctgctgctcgggaggtcagctgcgtggggagcctgtccacctggctgatgggggtgatggccgcgtggctgggattcctcctccagccctgcccttcaccgccatacagtctgggcagccccttcctgtcccgtcctcctgcctcgccctctgctggggtctacggggcccaagtcttgctggaacacaggcaggacaagggttctggaggttcaggccggaagtgaaataaaagtcgagaggggccgggcccggcacccaccgcatcctgcctccgggcctcctcgggcccctcacacggtggggcagcccctcctccagtggagcggaacggtgggccccgctgcccctccacccctgcgtgtgacacggacgtgcttggaagctgggttcgtcctttcagttttgtttcctggttggaaacccctgagactcctccccctccccccgcccctgcccacctgtgctttcccaggctggaaggggcagcccctctcagcacgtgggtggttaggctgtgacgtccccaggcctcctgggcctgcaccggggtccacccaggtgtgggccatgcccaggtgcgggaatggtcgggggttgccctggccggcttagggaatgtcgctctgggaccttctgtgggcgtggggaaggcctgggtgaggagggctgggctgcacctccctgccaagctggtgaatttggcttctagacccgggaaactgagccaccttctgacatttcacagccagggtggggccgagagcaacaggagcccagctggagcctgggaggggtggccctgcctctgcctcctgcccggggagaaaggggctggggcccaggggtgcccgcccggggctccgctgtctgagcagctcctctcttctgtccagctctgagcatgacatcatcacatgaagactcccagggtctctgaagagcaggccaggagggagcggccacccgacccagccaagcctgccccgctttgcccacgcgggggtcaggggccagaaacctgtt

SEQ ID NO: 1705 - DNA, 155 bp, Homo sapiens
gccggcacgcctgcctcctgccaccccaccctccccggacccgtgggaccccggctgctgaggcggggactgccaaagcctttaatgccagcgagaaggcgaacttgggtttccaagaaagagagactttcactaactttgaaggaggtgtgggc

SEQ ID NO: 1706 - DNA, 203 bp, Homo sapiens
tggctcgcagcccgtggggacgagggcctgcacgtccccgggggactgagggctgctctgggtgaggatgggaaggcgggtgccgcttccgagggctcctctcgccaagggagagagccctagacccgttcccggggcgctgctcttcccgggctggggtgggctgcagcggcggcaggacctcgccccctcccggccgcccg

SEQ ID NO: 1707 - DNA, 239 bp, Homo sapiens
cgcgcgcgcgcacacacacactccatccgcgccgagttgcttccgggaaaacaagcccagaaggcggcggacactcgcataaagtcacgcagtagtactcggagcccggggtagaacctggacttcaaatctctgcactcccggccgggtggtgggcgcatatcctgggtagcctctaggaagcgctagacacatgtaagtggttccttttccgcggttattttattctccccccgccc

SEQ ID NO: 1708 - DNA, 151 bp, Homo sapiens
cggaaggtggggtgggggcgggatggaggcggggcggggtgtacgaggggcgtgtacactggctcagggacacgcgctctcggccacagcaactggctccaagttccctccctcactctccggcgaagcctgcctgagccctcccactcgg

SEQ ID NO: 1709 - DNA, 180 bp, Homo sapiens
cctgggtttccaccatatgctttcggtcaacgacactcaccacagcatcctctctggcggttgtgatctcccgccctggtcatgacactaggcgaccccgctggctcttctgcggctgctatcgctgctgctgctctcgctgaggtgcttgttaacaggagtgcaaggaactggagatag

SEQ ID NO: 1710 - DNA, 176 bp, Homo sapiens
gagtactacaaagacccgggtttccgtccacgttcacgtaaacctccctacgaggggaaactacaggcgcgctgccggagggcgccgccagtgggcactcacgcacagctgctttggccaccacaggcgccccgggccactctcttccctcatctctctcatcccagcttccgccg

SEQ ID NO: 1711 - DNA, 261 bp, Homo sapiens
ctgttgaagtaaaggaatatgctgttctcggtgggtatttgggacttttgttccggtagaaaggtggattgggggcttcattcatattttcccattctgtttttgtggtaacaagacacatttaaggagaaataggcggtttaagaggagcacccaatggacttgttgctctcctccccacagatgtcagtcatcttgggcaagttgcttagcctccgttaattttagttttgtagtcgcccaatgggttcaccttgcctg

SEQ ID NO: 1712 - DNA, 248 bp, Homo sapiens
gctgaggatgaggaagctaattatctgtacgctaactctcatcctttgctggctgagggctgctcctaggggcctcactcaactctgcagcacttcctgcctgccctgagcaccagctgagcaagccccagaagaccctgggaagggaagtcacaggtgcttgccgctggaagccatctacgtgcgtacgaacaatgagcaccagtggaagaccggcactgcactgggagcagctgccacagcccagc

SEQ ID NO: 1713 - DNA, 132 bp, Homo sapiens
cccagatctgcagccttcgcccctagatacacccgcctggtgatgaggcgctcctcgcgttccttccggtaaccgcgttgcgaagaccacgctgccgggttgcaaacttggggggacttcctccctcccctc

SEQ ID NO: 1714 - DNA, 153 bp, Homo sapiens
gggtgtttaaaaaaggagggaacaaggaagtccctcacttcaaggagctaggaggacgcgagtccggcaaaacgggtcagacgcggagtcccaggctaagaggatcatccgccactctccccgggagtcctgctgagagactgcgactccgga

SEQ ID NO: 1715 - DNA, 257 bp, Homo sapiens
gcgaaccccggagactcctacctgtcctgccagcaacccgcggcgctctctcagcccctctgcggacctgcagagcaccctcaggaactcgaggcaggtaagttcggccgtggaggctcttcccacctctggggttcggctcctgtgcgcccctaaacttctccctcgcctggttggacgcagctagcgggattcaaaccttccttggattccctgggatgtgggggtggggggagggcgaagggatggggcgggag

SEQ ID NO: 1716 - DNA, 460 bp, Homo sapiens
ccctccccgagcctgcagcctacgcgagccccgcggggctttctggagggcgggcccggcggccaatcatcgctcccacctggcccgattgacagcaggtgcccggggctggctgcgcgaagggggcggggcctccggaggctggccagccaattgaggtcgtccggaaaaaagtggtcgcggcgttgccaaggtaggctgcgcagtgtctgggatgatgtcatggctccgtcttaaaggggacgcgggcggcagaaagtggagctgggctggtgtgcgcgcggccggagtctgtggagctggaaattcaccggtccaggaagacgtctttcccgcgtcccagcaccggtccagaaagacgtctttcccgcgtcccagcacctcgggccacgctccttcgtgagagcgccctctccaaggaggccggccctggatatttcacccaaaatatttatttttt

SEQ ID NO: 1717 - DNA, 327 bp, Homo sapiens
gcacttccgcgcctaccctatcccttcctggagcacatccgggactcggcgaggcgtggtctcgggaggcggagtctgacgcaagccggcccagcccacctggctaaattcacagtcgcgctcgctccttccgcccgccagaggtcgcaggctgcgagagcaggttcctggtttggcaagcactcgccccctcaggcccgttcattctcgcgagagaaagcgcgaggcctgccgggagtgagcgcggccgtacttaggtttgctcaaaatggcagcgctggaggaagaattcacgttgtcttcggtagtcctgagcgccgggcctga

SEQ ID NO: 1718 - DNA, 141 bp, Homo sapiens
atttgtgaggatctctgcatgtgtcgcgctctctggttccttacgggaaggccgaggccgctaggaagggttgcacggccggactcctaacagcggctctctggcctggcgggagcagaggggcgctcacatccgcagccc

SEQ ID NO: 1719 - DNA, 157 bp, Homo sapiens
ccggactgggccacgtctaggaagaggtaggaaaggatcggcgcatcatttctccaatgggaaaggatgtgtttgcggaccaataagtcgccagtataacacccgcccacgcgcctgccaagccaatcggctaggagcagcgagcggcgcggctgag

SEQ ID NO: 1720 - DNA, 149 bp, Homo sapiens
cgggacctaccgcttcgtccacctcccgcgcgccccaggccccgggttggggtgcagggggcgcaggggttggtcgggccagcgccgcagctccggccccggagtctctccgccttcacaaggaagcggaggggatctggctccgtcca

SEQ ID NO: 1721 - DNA, 146 bp, Homo sapiens
gtgccacaagagaccagccagggtcggggaccttgttcttaaactttccagattgtccccaggctcgcgtcgctcccgggaacggccaatggacgcttgtgttcttccagcgccccctacagccttgcaatggcattaaatcaccc

SEQ ID NO: 1722 - DNA, 139 bp, Homo sapiens
cccacagtctcagcaggtacacagggcggggagcctcgggagcggctcccttagcaggacctgagggtttcgggagagtcctggctttgcacttagttttcccgctgcctggctgcctccgtggcggttgtgctgcttt

SEQ ID NO: 1723 - DNA, 78 bp, Homo sapiens
cttcccccaccagcgcccatctttgtggtcccatcactagctgtgccctgtctcgccctcatagaccccctctagttc

SEQ ID NO: 1724 - DNA, 125 bp, Homo sapiens
gcgggaaccgcgtccctggggtggctctctccgccccatcccggccccgcctccgcactcgggcgggggaaagttgcgggtaccgctttaaaaatcccagcctgggcaaaactttgatgataaat

SEQ ID NO: 1725 - DNA, 146 bp, Homo sapiens
atctggagcgccttcgggcagtgctaagctgcacaggacttccggggacaacgcgcgtagcgaggcgacgtcggcgcgcatctcctccacatcgcgcttgagcttggctcgccggttctggaaccaagtgaccacctgcgcgttgg

SEQ ID NO: 1726 - DNA, 549 bp, Homo sapiens
tgctttgaggtctgtaaggatcaagttggaaccgtcatccccttccctggcagtccctaaaatccttcgagatgacgtcacccaacgagttcaagagggcggtgcgttcctaaccacaccttctgcaacccaagtgccgcccctctgactttctcctttttccttttttccggaacgccggaacgtaagacgtgggtcacgcaacaagagcaactagtcccggaagcaaaaagcaaagaggcggagaagaagacgggaagcagagcccgcgtccgggtcggccggcagggggcggggccgggcatggtaacggctcggaagcctaggaggctgggccggagggaggcggaggaaccggtgttcgccgccgccgctgcttcagcttattccttgtggcctctgcgggtcctgcctcagccatgatgatccacggcttccagagcagccaccgggatttctgcttcgggccctggaagctgacggcgtccaagacccacatcatgaagtcggcggatgtggagaagtgaggcttcggggcacggggtctgg

SEQ ID NO: 1727 - DNA, 164 bp, Homo sapiens
aaaaaaaaagtatgcattacgatttaaaatagataaactgctgccgattgctagaacaacttctgggccctctttccagttctccttaatgaaactatgcaattgcaaatttagccgcagaccaaaaacagcgttatggacggtctttttcaaattactgccaa

SEQ ID NO: 1728 - DNA, 176 bp, Homo sapiens
ggaaggtgagggcgcccggggcggggctggcgagcggcgcgggagcgtggctggggttcccgaggtgggagatatcgtcgggctgtgccaccggttcgtgcagaagttccagcgagggtgtccgtgtgttcctgagaagccaccgagggaggggttcccgagtgccctggaagtgt

SEQ ID NO: 1729 - DNA, 423 bp, Homo sapiens
gcaggaatgggagtgtctgtgtggccggggaggggagaggaggtaggtagtgacagctgaggctgctcccagggcagtcaggccgtcctcagctcaaagttcacaggccctttctgtggactgcagattaagtaaacctgagatgtctgtgtggctttctgagctacacagggctgtttattaagagggagagtttgtacctctgttaactaaaaggcagactgtcttccagcccaatggcagtgtggcggatcggccatggtggacacggtcaaggacatctgggtaccagcctgggctcccaacctctcactcctaaacccaccttttctgaagctcaactgatggctttggctcgcctttgcccttccttgggtctcaggctcccgctctgaactttcggtcgaccgcttagacgccctc

SEQ ID NO: 1730 - DNA, 256 bp, Homo sapiens
accatgtgacctgcaacggcaaccaccgaggcccggtcgcgcgggggctcctgggagccgcgctcccggcgggtcgtggcgccgcccgccctagagaatcgccgcggccctgaggaccccgttctgcccacgcgactgcaaaggcggccccgttgggctgagcgccgagtgcttgggaggcgaatggccgcccccgggacctcgggcccgggagtcggggcgagggaagcgcccggggcctgagggcaggagccgg

SEQ ID NO: 1731 - DNA, 188 bp, Homo sapiens
atatttttgaaccaagctgcatccgatttttagaagccacagcagcacttaggctttagtggaagtgaaagtgctgtcccttctggactagatctgtgccaaggtgtggtgtggctactgtccactttctcttgttctctgttgtttaagctcagctccccggctttcatagtaatcctggaagctac

SEQ ID NO: 1732 - DNA, 182 bp, Homo sapiens
gccacaaaccacaaaagtaccagcagcgccggtgaaaccacagagtcttgcagcaacggaaaccacagagacttgcagcacacaatagttactccagggaccttaaaacatcctttacactgcttcagaagtacagcactagccgggtgcagtggctcacgcctggaatctcaacactttga

SEQ ID NO: 1733 - DNA, 180 bp, Homo sapiens
cgagagtccgaggcagggtctcggagcctggacctggcttgggggtatcggagccgggattggggggagcgggccccacgtgcctgtgacgcgggggcgcccggtaggtggcggcggcgacgcggggccggcggccgtgcggtgccgggagggcggctgggcaggcggcaggatgctgcg

SEQ ID NO: 1734 - DNA, 139 bp, Homo sapiens
acccgttcccaccctgtctgggttttcgggtgttcaccattgaggtgggagccacatctgcgccccgtgacctggcgaacctcattgaacacttctgcccgacccccgcagcagcagcgcgaccggatggcatgggtgt

SEQ ID NO: 1735 - DNA, 312 bp, Homo sapiens
cagttcatggcagcccattccctccccacctgcttggacctagccgctctcacacccctcttgcgggcccgagcgtagcgagaagacccacgcacactccaatgccgctcacagccgtatcagtgagcccgcacccactcctgggggtcttttacttcccacccgatccggcgacccgccacccccactccgcgtctctgcctgcggggactccacggagttcgataattacctagagctccaccgcgccgccattacaccggacgtacgtcacttcctcttcccgagcaccgacggtaggaagaaggcgaa

SEQ ID NO: 1736 - DNA, 145 bp, Homo sapiens
gccgcgcagcagcgactactaaccgcgcgtgcgcgtgcggtggcgggcgggaggcggtggcggcccgaggtgtgtgctacgcgctcctgctccgaggggctcaaccgcctccagggggagccgcacatggagcctgtgccgccgc

SEQ ID NO: 1737 - DNA, 176 bp, Homo sapiens
agactgtgaaagcctcgcaactccgcgatcccccatccactcgggagcccccgcactcgcgctccggggcgcctcccccacgacgtgtggaaagccgctctccccgcgctccggaaccgttagccgcacccgcccgacgcctcccaggaaccaaaccggaccgggccgcgggggga

SEQ ID NO: 1738 - DNA, 136 bp, Homo sapiens
agtctacccttcactaccgtctccccaatgctgagcccccaaggagcgttccataaatgttaagtggctggccgcggacgaagaggctcagaccgcgcgagttcttatcattactaaaattccctctaacgggaaa

SEQ ID NO: 1739 - DNA, 135 bp, Homo sapiens
gtctgcagcgggagttctggaccggtctgtcttgctcccacctagaccccagtcctggccctgcgaggggattacgcatgttgccgggtaagcgaagggggtttccgtcttcctggactggcggacgtgaagtct

SEQ ID NO: 1740 - DNA, 423 bp, Homo sapiens
cagtggcgccccacgtccagccgaccgctcaggacgagagcctgggggccattcccgactcctcgtccctctcccaccccgtccctctgtaacttctcccaggtcagccgccactgtgtcctgctcacagcaatgactgcgacctctccgcatacacatcggttccggcccctcccctgctcgcgggactacccagccgggtgttcacagtgagctcagccgcgctcccgccctcccccgaggcttcgctcccacgcttcacgcgcgcggaacggggaacacactcgctgcagccccgcctgggccacggcaccctcgagcgccagccccgcgccccacccgggagcagcgagccaccggcgcgctccccaggagcccctgcaggcgccgggtagggacgccccatcaccccatttcttaaaa

SEQ ID NO: 1741 - DNA, 144 bp, Homo sapiens
gagctgaggaagtggacagcgggcacctttgtctgtgcctagttccctggacccgggccgagcgatgcgggtgggggcgcggttcgggcgggtcccggcgctgcccgggggaagcgcgcggcgacggcggcccggcttgggagc

SEQ ID NO: 1742 - DNA, 149 bp, Homo sapiens
tggccaaaaggaaacataagaaagatggtggggaaatggagagccagagagccgggccaccctcccgatgtattacttgacatacgtatgagattatctagcacggtataaatgcctccattaaatcacgattgagcttctcaaaccga

SEQ ID NO: 1743 - DNA, 267 bp, Homo sapiens
caatcattacctagccactgggtctcgtcgcctaggagaggaagcggagggtgctgcagacaccgaggtgaacgtaaagccggcgagatctccgtgctccgggtacccacagatactgtccgcgccgcccgcgccgacttcctgcctagctaaggcgagccccacccacttcccgcctccggggcacgccccctcagctccgcctcgccattcgtcgggagagccgtcactcattccctcacctcccggaaaggggtgggactgcga

SEQ ID NO: 1744 - DNA, 189 bp, Homo sapiens; identical to SEQ ID NO: 251

SEQ ID NO: 1745 - DNA, 246 bp, Homo sapiens
tgcacgccaccgccaggcttccggcccgcctggcgcagccttccccatccagctgtggatccgtcctgggatgcgtgtcccggcctgctgtctctccgtcacagaagggaatgttagaatcccgagagagagctgttaagggtagcggctctgcagccgctcacgtgggttgaatctcagctcgtctagttttcccatctaaaatgaaaagttactgttttaccacaaaataaattaatgtatgga

SEQ ID NO: 1746 - DNA, 132 bp, Homo sapiens
gaaaatgaaaccccgctgtttgccaacgaccagctggcttaatctgacttcgcagatgtagcagtgttggaaaacgtcggttcttttgctgagggaaggaagagatgggaggggtagaaagggcggtggtta

SEQ ID NO: 1747 - DNA, 173 bp, Homo sapiens
agcccatgaggtgctgaggtactctaaataggaggataaggtatgaggcaaaacaaggctggagtcaaacaaaggcgccgttgcatcgcagattgcaacctgaagcggctcccggctccctggagagtaacccggagagacggacaggggtggcagccaggaggagaccgcag

SEQ ID NO: 1748 - DNA, 275 bp, Homo sapiens
gagtgtcaacacccgagagagggaacctgagaggagcttgaagcagaggatgggcccagaagtcgccggcgtccgcaccgaggtcgtacctcgatatactcttcctcgtccaggacccgctgcttgctcgtcgcagccccagcctctcccgcctcgcgcttcctcgggggcctggacgcggcgggaagcaacaaggacgacgctgatgcgcccggcgtctccatcgctatcccaggaaaaagctcgggcccagcaggcgcgtcacagggtggagg

SEQ ID NO: 1749 - DNA, 141 bp, Homo sapiens
atgccaagtgctgaaactggaagagcccagcccaaaccctgggaggccaaacagacacgtggtgaaatccagtgagtctacccacaagctccccgaagccctgcccaggccagagctatccccaaggcctgtgggaaggag

SEQ ID NO: 1750 - DNA, 135 bp, Homo sapiens
gcgagcgctcacttccggtcccaagtaggcccaggcagaagcatcacctcgccggcagccgctccttggacatgctttccgctgggaacccgagctctacacccctgccccaccgccgccccggtccttgctcag

SEQ ID NO: 1751 - DNA, 176 bp, Homo sapiens; identical to SEQ ID NO: 1

SEQ ID NO: 1752 - DNA, 288 bp, Homo sapiens
tgtatattttatatcatattctagtttaccgtgtgagagttactcagtcgttactggaggaggccacaaatacttattaaacgtgtgaagtattttagtttccatgctggttagtaggctgtgaagatgagttagtgtgcatagaggaggtagaggatgtgaaactcagggtgggtgggtgaggaggaatttgcccaagacaaagctattgttagacctaggaggagaggcctggtgctttgcatcctcgggctgtgctttcacacacaagccacatcatctcttccc

SEQ ID NO: 1753 - DNA, 127 bp, Homo sapiens
ggagaaagacgaatcccctccctgcattctcggacagtgccacgtcctccggctgccagcggggcagcgccgctaggtaccgctgcgcgccgcccccgcttcccgccagcagcctcacctttcccgg

SEQ ID NO: 1754 - DNA, 573 bp, Homo sapiens
gactctccatcctgcccgccggaggaggatggcacctccgggagtgcagggggcgctgaggcaggagtggaggaaacgccacctcttgcccgcggcgctggagcctccacggttgtccggctcccacagcggaaggcctgccacgcacccatcctccgaagaccagcgaacccacctttacgctcagcttcgctgtcggcgtcgctcccgaagagatcctccatatccgccattatcgctcacgtccgctgctgcctcggttaggggcagctcccggcctctctttacggcacggaaccactgaaacacgacagtgtcgcaaagattcgccgaagacactcctttccttacgtgacctagttttcgctcgcccagtgaacctgttctcgcctgggtatgcatggtatataagcccggccatttcgtcaatatctgttatttgccaggattcttaccagggggcgggggggtcctgcgttcggttgcgggtgtggatggggtgggcggtgactggcgctctctggggaagggcctctggctggattaaacctatcgcgagtcaggattgaagcc

SEQ ID NO: 1755 - DNA, 157 bp, Homo sapiens
acactgcgtgtaaactccaggccagcagacgacccctccccttccctcctccccctttttatcttgcccgcggaggagacgccccaggacttcctgcagtatatattctgcctctgatctccgtacttaatagccaagtcctagtttatgctttata

SEQ ID NO: 1756 - DNA, 370 bp, Homo sapiens; identical to SEQ ID NO: 314

SEQ ID NO: 1757 - DNA, 153 bp, Homo sapiens
acgggcggactgacgggcgcctccaccttgctccctccctggctgccggcttccttttgtctttctgggcggcgatgagcgcagggccggcgcagcagctgcgggcgcacggaggcccgcgctgctagtcactcctcccggcctcggcgcgct

SEQ ID NO: 1758 - DNA, 150 bp, Homo sapiens
aagcagaaaaatgctggcagccacgaggcctgaggcgcctcaggcgtatcgaggactttgaactttgaggacgcatgcgcgcgcgcggccgctgatcgcagccccgttgtgcccgcaacgcctcctgaagaacgcggtacgcgatgctca

SEQ ID NO: 1759 - DNA, 181 bp, Homo sapiens
gctcccaaactcaccctcggtcccggccgcggtctcggtcactcgaataacccgacatggcgtcaatggttgcggttggcggggaacgaagtatatagaaaagcgtgcgacaagtcgctggaaatggcctcgatgacggcgaagccttgcgggggcggcagcggaggaaggacaccgatga

SEQ ID NO: 1760 - DNA, 146 bp, Homo sapiens
agaggtctccgactggaaaggagagaaccgacctagccaccaggccctaagctaaaaattatctgcaatgagacactacggacttccaaagtcacccaggacctcctacctgaaggacccttggctgggagggcagcttgcggcag

SEQ ID NO: 1761 - DNA, 428 bp, Homo sapiens
gggcctgggaccctgggctccacttctcggcttctacagccaggttctgggacctgcagcgcgcaagaggagctctcttccacggggctgccccgcagggcccgaggcgcccaggactttgcaacccctgccctgttcgccccagaatcatccagagcagcccccgcccactacctggccctccacaccctccctcccgcctccgcctcagcctcatcctagcgctgcagcccacccgcgtgggggcggaatccgcccggcacacacgtgtgcggattattaagcagccgagctagggccgccgcggtctccacgcagcaacctctgctaattgcgggggaaggcagccggagcgtgcggaactcgagggaaccgagagtgagctcagaggctgagttgcctgcctggaaaggaggaagccccgggcc

SEQ ID NO: 1762 - DNA, 240 bp, Homo sapiens
cggcccctcccaccagacccaggccgacctagatgacgtgtccgagtaggagttggcgaggtgcggccgggcggccggccctgcgcatgcgtgatacttgcaccggtcgagatggtagcatgagtctggaggtcattttctttgagaaaggctccgcttctccgggtttttgctgatgccgatcccgggggattgaggaaacattgagctctggagtggaaaaggttgcagacttttaga

SEQ ID NO: 1763 - DNA, 176 bp, Homo sapiens
cgagaggcctgaggcaaggatcgcgtcagaccccgaaagctggtttgttgattagtgatctaagaccgccggaagcgcttcttctcaatcaagctatgcaacaggaagtcattacgatcccgttgtaacctctaaatatgtccccgttctgcacagcatcccgataaccgttttgt

SEQ ID NO: 1764 - DNA, 150 bp, Homo sapiens
gtttaatgtagtaatggggaaatgcgaagccatccgagcacaagcgctccatgagggtgggccacctctcccgctcgtcgtcttccttaatcgtcggctgcaaattgtagcctgcagccgtatttcagctcgccttcggggatcgccgcc

SEQ ID NO: 1765 - DNA, 146 bp, Homo sapiens
aatctccgcccttggccaaccccaggtgtcctcaggccaggctgccgcttcctccccgggccctgcctcctccatctcgctcccttcccaggacactcagtagccggcctcggcttccaacgccggcctggctcccggggtacctg

SEQ ID NO: 1766 - DNA, 273 bp, Homo sapiens
ttttttctttttcagctgttactacaatggtcaacaataacgacaaaaaccacttaaagttggacagacgtctactgcaaccaactctcaaaaagtttagaacagcgcactacgccccgcccattggcgagaaacggaaatacccgctttcgagaaaaccggaagtgcgtggtcacgccccgcgcatgcgtgcatcggggcagctcacgcttcctaaatcccgtcatccagtgagaaagcagggactcttcggcctaggcagccgggacccag

SEQ ID NO: 1767 - DNA, 156 bp, Homo sapiens
cacctctgcacacccacactcgcctcctgggccgcgacagcttccttctgtcaatcaggtgtggacgggaaggtctcgaagtttcctcgcctgagttgaaagctggaggtgggggcacctctgcccgttcctaactgccccgttataaggtccccc

SEQ ID NO: 1768 - DNA, 252 bp, Homo sapiens
ctgctctcgcccgcctccccgctgccaggcaggctcgaccaatcagaagaggtcttgggcgggcgctgccgtccagcgagccaataggcgggcagtcggagccgggcttgcccgggcatgtgggagctgccggctttccggacgccacgtgcagaccggaagagacacgcggggcttcaggtgagatccaggaccctgcaccggggcggcggggtcgggcgggctgaggccgcgtgtcccgggtcgcaggtc

SEQ ID NO: 1769 - DNA, 111 bp, Homo sapiens
agagggtggggaccgagggaagcgggcgggggtgggagcgctgtctccgggccgccgctgatggcatcccagggctccgtcctcctcctgcctccatgtgggttgaaagag

SEQ ID NO: 1770 - DNA, 140 bp, Homo sapiens
aagcggctgttcagcgggccttcagggcacacgcccctcggcgctgccctcgcaggacgtcggggcacacccactccggcgtctcccctttaagcaagcctgagggcagctggctttctaggacccgcggaacggttaaa

SEQ ID NO: 1771 - DNA, 144 bp, Homo sapiens; identical to SEQ ID NO: 91

SEQ ID NO: 1772 - DNA, 266 bp, Homo sapiens
gattctcgtccactagaagccaaagcctgggaacgagagcaagcgatgacctgaagaggcacaggaagcgagggcagtgcggaggtggcgcgcatgtgcgaacacgcacgcagggagaggtgcacaagcgcaggagtgcaccggaagtccgcctcccgggacacccaccgcgggtcccaggacaagtaacggactctatttcccaggagcctacgcgctcccccagttttggggccgtcttaaatgtctctaccctgcctaaaggt

SEQ ID NO: 1773 - DNA, 149 bp, Homo sapiens
tgagaaagaaacaggtttctgtggcgtgggggtgagtgacagtccaggatgtggagtggactggattagtcgccgttttcagtcgagaggctgcctgagtcagaggctgtgtgagtacttgaataacagggaaacagttgaagggaggc

SEQ ID NO: 1774 - DNA, 142 bp, Homo sapiens
ggccagagcccgggcaggagcgcacacaaccagacggtggggcgtgcgggagatcggagcggtgtccctgcgggggctccgcctggctcctggcgctccgcacctcccagccctcggcgtcccggcgcgccaccacccggaa

SEQ ID NO: 1775 - DNA, 138 bp, Homo sapiens
cacgaaacagcgggaatggcaggtgaagacaaagaggcatcctatcggagaggcagataataactcggctccttcctagaaatgtgggtttgattaacattaattataacagcagctgagggaaaaccccacgcgaga

SEQ ID NO: 1776 - DNA, 146 bp, Homo sapiens
tgcagtgtagtcacctgctgtgtgccaggcagcaagcgccattagcccgggaggtggtgaacagctcctgggggcaccagccagcaccgtcaccgtttggcagcggaggctgcggccagctccttgtcaggtgaatgtgctgcatg

SEQ ID NO: 1777 - DNA, 250 bp, Homo sapiens
ggcagcacagaaactgagagccctctgtgcgggtgtctcagtcttggactgtagtcctgttgactgacttaactcttctggtagtcgttacaagttttcttttaaactagattacatgaaataatgtttgttggcaccagtttgttaacatatgctaagcagtagtttgtcagacctgaccacaagctgtggagggctgatagctcatactagccctcgggtttgagtgcctactgtgtgctaagctccc

SEQ ID NO: 1778 - DNA, 139 bp, Homo sapiens
ggacacccaggggtacgagctgtaggccaggcctgagggcgagggtggtccccacaaatcttctttcgccggcgtgacggtcagcgcttgcaggaccgctagtgcaacttcaccccagctggcgggaagttggagagcg

SEQ ID NO: 1779 - DNA, 114 bp, Homo sapiens
cagagaaggaggcaactgcggggaagaggagagaccggccagtgggcgcgagaaagacagctgctgagagagacagacggggccaggccagcggcgggcagacaagatgaccca

SEQ ID NO: 1780 - DNA, 244 bp, Homo sapiens; identical to SEQ ID NO: 362

SEQ ID NO: 1781 - DNA, 137 bp, Homo sapiens
gagggccgggggtccggcagccgcctcaccctggcctcggagctgcccggcgcgcccttccgcgtcgggggacgcggagctgaggacccgatttagatgcccggagccggcccaggtcccagccaggaccaaagtcc

SEQ ID NO: 1782 - DNA, 140 bp, Homo sapiens
tagcgcctgggctttctgcggccgcgcgcagtgcggggagctggaccccgtcccatcctaggtgggggagcggcgcaggcggggccagccgagggtgcagggggggcttttcttctaaacagtggctggtcgttaaaagt

SEQ ID NO: 1783 - DNA, 279 bp, Homo sapiens
ggtggctgacgtacagaacgccggctgtatcacccgggcgccggcgccgcctctcatccccgtagctctcggggcgcgccgggagtagccgagccgctgggtgctgggcggggtctccgggcgcggcgcggggggaaggcaaaggaaaagaaggggcggcgggccgacgtcggcggcgaggaaggacggaggagcgccggagccgctttgctgccctccgcgtggtcccgtgcctccccgacaccatggccctggctgaggtagtagtttgtgctgttg

SEQ ID NO: 1784 - DNA, 139 bp, Homo sapiens
ctggcgcgcggacgcgccgctgataacgcatgtgcgaaagagacgcggggcccagtcagctttctccgcactcagacgcacgccctaactgtcgggcgctcccacttgacacggacacacgcccctgccggccgcccag

SEQ ID NO: 1785 - DNA, 171 bp, Homo sapiens
tgggcaggagtcaggggcggacgcctgaatcttgtttctcagaagagccgagaggcctaggctcaagcttggggcgatccggtacttggaggttcgaagctcctagtttcgggttgagaccgatgtggagggcgatgacgcgcgggttccttgacatcgaggatcagtaac

SEQ ID NO: 1786 - DNA, 141 bp, Homo sapiens
ccaggccccaggaagacgctgctcatgcgtggagcggccgcaggaaaggtactccccgctaaggccttcagggagcggccctttgccctgtgcgatctcttccttcctttcccacgggttgccaaatcctgtgacgctgcc

SEQ ID NO: 1787 - DNA, 147 bp, Homo sapiens
aggcaggacttactaggagtcgttcagaaactggcaaaagcaccctctgaataaatgttcagggttccatccggagacgcccacggtgactgatgagtcatcagatagccagctgtcgccacagagtgctatatatagaagctggag

SEQ ID NO: 1788 - DNA, 150 bp, Homo sapiens
cctcgagaggctccggaagtactgggtgcagcctgatggcgcaggaggtagacacggcacagggcgccgagatgcggcggggcgcgggcgcggctcggggacgcgcttcctggtgctgggccctggcgctgctttggctcgcggtggttc

SEQ ID NO: 1789 - DNA, 248 bp, Homo sapiens
aactaaggccggcctgcagcagcgacctcgggggctggtggggacggaagaccggacctcctggcccgaaggctgggcgcagcccccgcccgcccgcctcttcccgccggcgcctccccggggtggcagtgtggggagagtggcttggcgcccgcagggggcgccgcgagcccaccgcgagagcggccgcggcgcggggtgggtgccgaacgggctgcgcgccgcgctgctcccgacccgcgggtcaa

SEQ ID NO: 1790 - DNA, 270 bp, Homo sapiens
gaagtcattgcaatggtaaagtaggtaagaggctggggtggaaagaaatgccttctgcataaatctagttagtctgagtcgttttttgacaacttccgggaccagacttcaggcagtgctggaaattgttctctttaccatatctttttttttttaactgtacatatttacatacatacacatatggtgagggagagaacgtgatgacgtgagactctccatggagagtaggaggtaataaagaaataaaacaggtgtctgaggagaggt

SEQ ID NO: 1791 - DNA, 288 bp, Homo sapiens
gcgcccagcatccctggcgccacccgcagccattttgtgggagggtgggcgaagctgcagcggcgcgtcatctgcagggcagggctctgggctccatccgcaggctgcagctgtgctcgcccgggcgctcggtgtgaggagcacccgctcccggtcgtgcccgaaaggggtggcccagcgaggcagagccgcagcgctgggctcctcgtgcttctgtgaacggaaaaccagaggtagcaaatagcagttccgttctcgtgattcttaattctttttccacaaggacat

SEQ ID NO: 1792 - DNA, 216 bp, Homo sapiens
tgatgtttgttttttactcatttcggctagggttagcttgtgggcttaccaaaactgtgactgagacaaatgtgcagtgcaggaaacaggcacacctggaagtggtaaataatgggcgggccatgagtggactaaaataagtgtcggattctgactgaaagcctgcccacagatgcagctgtacgatggaagtacatcaactcacttgccactata

SEQ ID NO: 1793 - DNA, 129 bp, Homo sapiens
gcggcggggaagatcaggaaagaactgtgagtacctaagaaaaagaagaatacacgttagctctctttactgaggtcggaaccttccgagacccgccacatttcagcccgacaaacccgagatcacgtt

SEQ ID NO: 1794 - DNA, 150 bp, Homo sapiens
cccggctcgcctcacgtggggctgggcgcctctggccattggctgagcggggcgggggtggggcgaaagcggggccccgccctttccacccaagctggcctcgagcgggctgcgggcgccaccgtcggagcgcgcgggccggggagccgg

SEQ ID NO: 1795 - DNA, 189 bp, Homo sapiens
aaatgagtgttgtatctcagctgcgcccatcagctctattccccgaatgaccgtgagcttgaaggaaagccatttaacgcacacggtgccgatgggtgtcttctgcttggcgacatcgtgggctttatcctacttcctcaaggaggcataaaagatgattttttccccacaacaatgagctttcttaca

SEQ ID NO: 1796 - DNA, 141 bp, Homo sapiens
tcgcctctgagaaatggcgcagcaagcgctccgcggagagcctggaggcggggcgcccttctctgagtccgcggggtcgcaccccgagccagtcggccagacctgcatcccgcgtagcatccctgccctctctgtgcagcg

SEQ ID NO: 1797 - DNA, 335 bp, Homo sapiens
cgtggaggacgccttcgagagcaagacgctgccgctggacgctctgggcggcggccgcccgggccctcgggttgggaggcgagtctgcgcggcgcgcggagacccctcaacggccgcagcaagtccccgagggcagcccggcgtggcccaggcccgggacccccagcaggtagtggccgcgggacagaggccgtgggcccgggctcggactccccgagaccctcgcacccggaggacgccgggcgtggggctcccccgctcccccctgcggggtcctccctatccgtaaaggtcctgagccttctgggtcctgcgaccaccccccacccccgcga

SEQ ID NO: 1798 - DNA, 138 bp, Homo sapiens
tataaattgcctgagagcttagagacaatcaggtcaccaccgccctcacaagagaaaagcttcttacttccgagcagaacggttcagctgggaagagaggaagcagggagagaatctatgctttagtcgtcactgctc

SEQ ID NO: 1799 - DNA, 248 bp, Homo sapiens
gcgaaatcgctaacccccggtcaccagacttatcgcccgggcccgagccccccgggagccagaagagtgtttgagaaacggacattctccgccggtcccaataggggtccgacaccagcccgttgacgcgcgtttccccgctcccagccctccagtggacccgaaccggatccttacttacgcttgtctccgggctattagccgatgcatgggagtcgccatcttagcgcggtcaaagccggccgcgc

SEQ ID NO: 1800 - DNA, 139 bp, Homo sapiens
ctgcagacaggcgctgtgacacgcttgcgccccggtcgaacaggcgaagaggccgaggcccagagcggcgcagggcgagcctggaggctgcgccccagacctggaccagccacggacgccgctcccgccgctccctccg

SEQ ID NO: 1801 - DNA, 152 bp, Homo sapiens
tggaagacaacccatcagctcgtcttctgagctccttctagcgccaggaattccatagaaaccgcatattgtttgattcctcagcccccggatgggttgccagagtgcagtgggacttgccaagagaatgtgacctctgacaaacaatgata

SEQ ID NO: 1802 - DNA, 146 bp, Homo sapiens
gagagactttgcggtttagaaccggcagagggcggggccggggcgggacctgtgtgtctcacatcctggctcccagcgcctctgtttttcgggtttgggaggcgacagcggccaggaagtatgaggcatgattcaaaagccctgga

SEQ ID NO: 1803 - DNA, 212 bp, Homo sapiens
ctcgtcccggtaagttactgtttcctgattgctatagggagtaatatcaaggggctgtgacgcaatgttatggaagccgccattttgtacggaagccaaagtccaatcacttccatagcaagcaatcgaaagaagatggccgctcccacgattgtgggggaggtctccactggggaggggcagaggaaattcggtcgaaaaagagataaagc

SEQ ID NO: 1804 - DNA, 147 bp, Homo sapiens
acgcgcacggcgacggcggcggtggcggcagttcctgctctaggctgcgagcggctggcggcttcgaggggagctgaggcgcggaggggctcggcggcagcggcggcggctcggcactgttacctctcggtccggctggcgccgggg

SEQ ID NO: 1805 - DNA, 179 bp, Homo sapiens
gcggaggtcgccgtggccgccgggggccccttctcggcgctcttgtccccggggtagtcggaggaggcgaggttttccggggtgccgtaggctgtctcgaaaaactggtcgaaagcctgtggcaggacgccgttcctgcccacggtgctatagaaattggacgagactgcgggggtggg

SEQ ID NO: 1806 - DNA, 137 bp, Homo sapiens
gaaagcgcggtgacagccggctcacccagaggagctgggagcctcgggcgctcggcaggtcgggaggggtgccggcgagtgggggcccccaagagggcagaagggggtagggaaggcagggccgacccagtacagca

SEQ ID NO: 1807 - DNA, 113 bp, Homo sapiens
gatcccaagtgcatgctgggatttgtggacaaacatctttacagaggactacaattcccgagatgctgaagaaccagcggtgaaggcgttgcattcagggaaatgtagttctc

SEQ ID NO: 1808 - DNA, 148 bp, Homo sapiens
tatgtgttttgttccgaggggacgtctggcaaccagaggtctgcagttcagtgaacggagggagataagagagcagacgattccgggctggagcaggcgccagggttgccagacttacctcatttttccgcagaagctggcagtccag

SEQ ID NO: 1809 - DNA, 149 bp, Homo sapiens
ggctgggccatgggcagcactgccgagcacccgcggcgggtagagcaagtttctggatggcccggggcaggcgggcggggagaaggcgcaggcacccactgagacccggctgtcgtggcggcgactcctggctgccagggcgcagagga

SEQ ID NO: 1810 - DNA, 140 bp, Homo sapiens
cggcaccttggcgtggcgagagcaggtggagatgcgcacggaggttgcatgttcacctccgggtctcgggcgccacggctgcccgtacctgttccagcaagcgtcagccaggaactgccgcgctactgattttcccttcg

SEQ ID NO: 1811 - DNA, 100 bp, Homo sapiens
tcgttggccgactcaggtgcacaacctccccgccttcatttcagcgagttcccctataatcacttgatctcggtttctccgccttctcctcctccccctc

SEQ ID NO: 1812 - DNA, 142 bp, Homo sapiens
gggctggtgggttcccgggtggggacatgtgccaggccgagtcgggcgaggtggcggtgcggaccccaggtggggggcgcgccctgcggcgctatttccccgacagacgcactgttaccttgctgtctaggggcgagggcgg

SEQ ID NO: 1813 - DNA, 142 bp, Homo sapiens
cccgacggctctgcagttaacgggaccagctctgcggagtaagtatggggcgggcggtgaacctcggggcccggctggggaggcccgagccggggagcaggagcgcgcgccaggctccgatctggtttgtcacgtacgtctg

SEQ ID NO: 1814 - DNA, 195 bp, Homo sapiens
gggacataaagcaataaaagagaatttgaaattgtggcttcccggctctcatgcggaaaccttgcaccttacgtgggcggagtcggctggagcaggctacgatgggggagacctctgggggttccataacagcgcgttcgtgtcttcagcgtggcgctgctgccattgtttaataataaactgtcggtgccttcg

SEQ ID NO: 1815 - DNA, 289 bp, Homo sapiens
ctccctctggccgtcagcttccagggtcttagactatcacatcctgcctcctgctagcggtctgctctgagcgtgcgctcaactgcactcaccctccggttccaaggccctcacggcccgggcgcccccgcccacagccctctgacaggtggctccgcttgtcttcgctgctgcaccagggggcggggactccacctttgcggtcccgagtgaagctactcaaccttttaaaaaaaacatccacggacgggacgcgatggctcacgcctcaaatcccagcactttggga

SEQ ID NO: 1816 - DNA, 151 bp, Homo sapiens
ccaaggtcaccacgcaccgagcccgcaggaaacgcgcgcaaagccccagccacccgccacccagttcctcccgggactcgcgcccccgccaccaacttcgcccgcacctgcccaccgcgcggcgcccccgctccccggcgcgctcaccttg

SEQ ID NO: 1817 - DNA, 134 bp, Homo sapiens
accaggcttaaagttttgacagaactgccagaggctgcgggtcaatggggtggccgcgtgtctagggagagggcgctggcggcgcagagggtgcggggcagggcacttgcgagtgcgtggggaagtctatttgg

SEQ ID NO: 1818 - DNA, 249 bp, Homo sapiens
ccctaggtgggcgtgcccggcagccgacggggcggggcggatatgactggcgggccgactagtgctggttgccaccgccggtttagaaatcctattctcgcgccggggactggatttttccctacgtcagcgcagctaggcgatgtcgggagcgagctcggaccgagggctcagttgcgtcagtgccgcgcgcgtgctcgtcgggcgcgcgtgctcgtcgggcgcgcgcgcttcccggccagacttggg

SEQ ID NO: 1819 - DNA, 204 bp, Homo sapiens
ccgggaggtgctcaggaaagggttgtgaccccgagtgacagtagaggctcagagaggtcaggatgtgtagtgcatggtggagctggccactaactcgggccgcttcttgtcttgtttgagtagcaattgaggggctcctgggtgccccgggctgggctgggcctggagtcagcaagccccaagtcttgccctcccttgccaggg

SEQ ID NO: 1820 - DNA, 137 bp, Homo sapiens
gcctggaagggggttcccaccttctcagtccgggacgcgagacgggaacgcagccctggcgccccaacgctgcaccaccgtgggtctccgagccgtgctcgcagtcgctgagatcctcggtgcggagaagatgtgcc

SEQ ID NO: 1821 - DNA, 147 bp, Homo sapiens
tgagacactcagctgctggagccagggaggaaggggcaaagagacggtggaagctgaaagagacagagaaaaagctacggaagccgaccccccagcagctgctgccagctgcaggtgtgcaggaagtgagtgctgttgtgtgggagg

SEQ ID NO: 1822 - DNA, 195 bp, Homo sapiens
cctttccatcccgttggtctgctgggtctgggagcactgggctccaccctctccgaacgaacacctggcggttgggcgtgcctcagtttcccggaggcggggcattcctccgtcgccgccccccacctcccctttttcctcttcctcttggggcatctgctgccgcgcctgtagcactcccggaactggaactag

SEQ ID NO: 1823 - DNA, 155 bp, Homo sapiens
aatgctcgccgccttctccctctctcggcccggccggggtcgcctcgcggcgccgggacccgaaggccaggctcgcgggcccctcccagcgacagcccgagcccggcccgctatctccaccgcatctcacaggctgagcccacccgcgcgtctgc

SEQ ID NO: 1824 - DNA, 248 bp, Homo sapiens
cccgggccggggaggggcgctgctggcctcgtttgggtgtggcccggagcactgagcagcggattccccaccagccgctccccgcccagccccgcggtgctccggacgccccgcgaagccgggtgcagggttttccccgggcagcaggtccgggcctggggactacccaggaggggcgcgtgggccgggcggagctcaccttggccgaggcgcggcggacgctgggcgagctgggcgagctggacgcg

SEQ ID NO: 1825 - DNA, 352 bp, Homo sapiens
aaatccttttgtggcttcaagtgtctaagtacattagagtcaggaacggcgctttccagcgtccgccatttttgtggcgtcaccgcgtcgctgctacgccatccccagcgcagtggctgccgcgctcctgtcccagtgtcccccgggaggtcggcccgtgcggtgacgcccctgagcgcggggtacgccgggagttgtagtcctgacggcacagccttgcagcgtctccggaagtggaggcgggagcggcacggcagccactgcttggggtagcgggagggcagactctgggcgccactcccgggccggtcatgaacgggccggcggacggcgaagtggactacaaaaaaaa

SEQ ID NO: 1826 - DNA, 355 bp, Homo sapiens
gacaatggaatttgcttacctaaaaagctccgccccttgatggcgtcacacgaaaccaaccacgccccatattgccgcatgcgcactcttaagaggtcgaacggggagggcggcaggggctctggaacggaagtgacgcatggtacttgcgcaaagacgacgaggaggctgcgaaaagttaagggccggaccgcaggctgtgctcgcttccggaagtggcttctgcgacaacatgcttgcggacctcggcttaatcggaaccataggcgaggatgacgaggtgccggtggagcccgagtctgactccggggacgaggaagaggaggtatgagcacggttctggtctttgggtttc

SEQ ID NO: 1827 - DNA, 441 bp, Homo sapiens
cggccaggctctcgtagaggtggcagtagtgatggtgcaggttgcaggtgtacagccccgcgtccgtctcctccaccgctgcgcacccaggaggaagccgcgcgtgagccttgcggtgcccccgaccccgcggccccggacccctgccccgaccccgcggccccggtccccggtccccgcaccgcggatgagcagcgagaagttgccgtcgtcgaaggccgaggccgagagctccaggcggccgcggtcccgcgcctcgtacacgcgctgctcgcccgccgagtacaagtccagcaggcgccgcgcggggccacccccggggccgcgcaggtcccagtggagcacgcgctggcggtcgtgcagccggtcctgggtccacaccatgcgcgggctctggcagcgcagcaccgcccgggcgcccgcctcccagctcaccgcgga

SEQ ID NO: 1828 - DNA, 151 bp, Homo sapiens
cttccgggaggatctgggtggagaaaggggctgggccaagccgggatggagggttggtcacgcaggcgcggggggccgcgtcgagaaccccacgcgggagcttctggagtctccagccaccgcttctcacttcactggagaagggagctgg

SEQ ID NO: 1829 - DNA, 147 bp, Homo sapiens
gctgcgaccggggcaggggaccggggatgcggggcagggacacggcccacacttgctgtgcacgcaccgccctcccccaaacactttgcaaagaggtcaccgcactggctgcgagcgcgccctgagccccgggccgcagcacgcgcg

SEQ ID NO: 1830 - DNA, 242 bp, Homo sapiens
cccggtggcacggaggggcgcgggtcaccggcccgggtgagcttacctgcagggctgcggccaggaggaaatgcgccaccgcccaggccagggcccctgggtgcgggaggggcagaacgtgggacctggagcggggaccgaaagggtgcgggcgggagactatgggtggggcggcctgggagggagcctgagacaagacccgacgcccccagccgctccacgtcgctctgcagagcggctct

SEQ ID NO: 1831 - DNA, 149 bp, Homo sapiens
acccgagacgcggtaagcgcgaaggcagcctcctcgacccaagcctgaagcctgactaacccacaccgccctccccggcgcacccagtgcgcggttacctgctaatgcaggcgccgctccgccgcacttctccgcgcgccgccgcgccc

SEQ ID NO: 1832 - DNA, 135 bp, Homo sapiens
gggcatgctcaaacgcccagaactggcttttttcggcaactttggcagctctcccacccccacccgaaggggcaggtacgcacagctccctccgtgtgagtaaacggaaagaaattaccccactcccgcccaggg

SEQ ID NO: 1833 - DNA, 206 bp, Homo sapiens
gtggatccctccgcccgcgcttgttgtgctgaggccgagggagtcgccattttggatggtgaaccctgaagtcggtgtctgctgcgttcacggcaggattcggttaggtgagtgtggcatcctcggcgtcagaggtctctgtcttcctcttctctctgcgctcctgatttagcggtctctagttagcgctagggcccgggattcaa

SEQ ID NO: 1834 - DNA, 154 bp, Homo sapiens
cggctgggatgctgacggggaaagagctgacagagaaggcggacggcatggtgttgggaagcccgctctcacagcaaccgccgaacccggcctggccagaatccacagaggagggcgccaaatcctctctcgtgagatctgcccttctcacgaa

SEQ ID NO: 1835 - DNA, 140 bp, Homo sapiens
tctgcatccttttttcgggtggggaaggcggtgccgaggagttgggaaattaatcacctccagaaagcagagggagcgcgccccgcaagaacccgagtggaaacaaccgaagaccagaaagggagcaggaaggacggctg

SEQ ID NO: 1836 - DNA, 145 bp, Homo sapiens
aggcccatcaccctgtgcaatgtccccgctccaccttgagtcgtcttggaaacggtcgccagggaaaccgttcttcccgctcaggcccgcccgccctcgtcaaaagcttggctcagagagcgggggaggggtgtgtagcgtagaa

SEQ ID NO: 1837 - DNA, 145 bp, Homo sapiens
ggagactgagcggacttaaccctaactgtgcacaggaccgcgctctccgacccctttgtggcctctcccagaggtacgggctgcgccccaagccagcagtctctcgtagggcctacagccggcagccgctggagcaggaggagga

SEQ ID NO: 1838 - DNA, 457 bp, Homo sapiens
gcgcgcgagaggggacaccggaagactgcgagccccgctcacctcgagctctcagctcgctccatggatgcaacacccgatccgcctcggggactgggaaagttccctccagggctcccacaggcgctccgcctcctgaactcccattggctgctttcgacgttgtgctccaccctttccgggcggggcggcaaaaatacttcccgtctctccttttcgcctattggctctgtcaaaggtcgacttcgtgacgtcaaagagcctgggccaatcagagcacaccggactgcgttttcccgaacgcccgcagcagggtcagaagggaggtggccggtctccgtcgtgacctctgacggtttctgagcgttggcctttggcacgcgctacccccttttgctttggttctgccatgccgatgtaccaggtaaagccctatcacgggggcggcgcgcctctc

SEQ ID NO: 1839 - DNA, 147 bp, Homo sapiens
cacggcagggcgagatggcgccaccgcgtgatactgcgcacgcccacagctcccgtcccgccctcgcgcctgcgggtacggacagcgcatgagcttatgttgagggcggagcccagaccagcccttcgtcctatcctgcccttccag

SEQ ID NO: 1840 - DNA, 159 bp, Homo sapiens
tgagtagacggactgcgagtgccggacacacgcgcagaggatgtgacggactgacggaccaggcgtggacggaccgtgtgtgcacggactgacggacccggtgtggacagactcacggaccgaatgtggtgcggaatgacacactgagtgccggacgga

SEQ ID NO: 1841 - DNA, 213 bp, Homo sapiens
ccgcggcagagccgcctggcccagatctcggcggacgtcctggagtggagccggggcctggcgctgccctactcctacctgaaccccgcggccgcagagaacggaatcgcggtgagagcgcgcggcacagcctgcacctgcaccccgcggcgccagccctgccgccagcgccccagtaacttgccgcgcgcattcacagccagacccagggaa

SEQ ID NO: 1842 - DNA, 167 bp, Homo sapiens
gaaggagtcacgtcggtcgttaaggttaagctttgtagagaacagcggcgtttgtttaacgtccggggatgctgaactcgaaatccccgttctgagccggctacctaaacaaccttcccgaccacctctcctgacctcggtgcttgggaccagggaaaagcagatct

SEQ ID NO: 1843 - DNA, 370 bp, Homo sapiens
ccaataacatgggcggttttctcctgtcgtgtgggctagcatacccgtgatgctgacttgtgccctctacccgtctcacccgggctagggcccactctttgcacctgcactctgtctctgagcacatgcacagatctgaattcttacactggcagatggagctccgtgggctcctgtgttaccacgcaggcttcaatgtcatataaaacagagcagggagtgaaacttccagtagctctgttttgtcacccacagccctgcaagatggagcagtttacacccagctctgcaggatgtagcctccagtattcacaggctccgcagggggagggaggggcgccaccagaggcttcctgttgctgcccacagg

SEQ ID NO: 1844 - DNA, 161 bp, Homo sapiens
acgacaaggagttgcgagaaagggcagagctcactgaggaggcaacagagaaagtccgctaacaatttttgaaggccgtaagttaaacatgttaaaaactgtagctactcactcagccgacatctagtaaaaaagatgcggcaagatcaacaaggcatata

SEQ ID NO: 1845 - DNA, 865 bp, Homo sapiens
gagtctcaagggtggtggtcttaagtccgaagtgctgacagcctcactcaactgtggggaggaggcagagagggagggtggagacagagacccagaccccgagaaacaagtgtggctccagcccaggagcctcacagaacacatttcctcctccgccttcggctctgcgtgggctagccccgcgctagggagggcaggcaactaggtcctccgaggtgaggctggggctccgcctgcagagggagtgacagcgcgccgcgagggtccgcgacccaggcaggggtggccgcaccaccccggagcgccgcacagccccgcaggcctcccctcccgcagtgcgtgcctggaacgcggggccgcctggccgagggacgtttacctggagagctttgtgtccacaacactaatccttagacactgcttcgttcagcagctgccgtcagtcgtgagggcactagtgtggggatgggggcgaattcaggagcccgtcgcagagcaatatttaaaaaggggggggggagccggagctgctcccaggggaggcctcgcgcggcggcgcccacggccacggtgtccccgctgcgagccaacaaagctgaggcgctgtccgcgggaggagagagcccagcgcggggaccggcgcgggtgggagtgggggcgcggcgcggaaaaccccagggaaggaccgggtggacacgggacgggaggggggtgacatcctcccacccgggggttagaaaaggtccgggtggtagttccaggcgaaaataggcagccctctgtgatgacagaattgacaactattttttgggggggcgggggttggacttccgagtccctcgggacggaggcgcaggggagcagg

SEQ ID NO: 1846 - DNA, 276 bp, Homo sapiens
tgcggtcttgaaacgggctctgggagcttcctctgcgcggtcggccctggctgaggcgtcccgggctgcgcgcggggctcggcgctgcgcagtgtccggtgtcctctcggtccggagcttctccagaggaggagcggctcgtgcgcccccagacctccggtactgggagactcgggccctcctgtaagagacctgagcgcggagcgttatgggcacccggtgaatgagcaaatggcagggaaaaccgtgcagccccatggactgcgggctcttcct

SEQ ID NO: 1847 - DNA, 316 bp, Homo sapiens
agcgcaaaacccagacaagttttccggtagtgccgccaacccctgtcaggcacagaagacacagcgagaaccgtgagccgttacgaaagcctaaaacactgagctcgcgtcctgccaagcagcaggcgcacaaacctacacctccgagcgctccctggaggtcccgcccactcttctctcccgagccggctagagatctggaagagggcgggccaagggtgaggagggcagtatgcgcatgcgcgctcaggacccagtcagtgagccaataaggaatctcgcgagtgttgaaagtcggtggcgtaggtcgtcgtcc

SEQ ID NO: 1848 - DNA, 227 bp, Homo sapiens
cacaaaatgaatggaagcccctgagaaggagggcagggctgatgtcggacgtgcgggatgccagagtcgggtgccaaggcgcctcctcgacctcctcgcaccagcgtcccccgcccggtttccgcctccgcccgaagtgggggcgtgtccttggggcggagtatgggcggggctggctcccaggaagggcgtggcctctgtttgcccacgtctttgggcggggccag

SEQ ID NO: 1849 - DNA, 145 bp, Homo sapiens
tcatcagtgacaccttgaacttttcataaagaaaatgggtattgcacggagacggtttggccgcggccgccgcgcggggtcgtgcttaatattcaatgatctcgctcgcgcctccccctcctcttctcgcagaaattccaccgag

SEQ ID NO: 1850 - DNA, 135 bp, Homo sapiens
tattttgacttccatcccctgaggtttagctctgcccggagctctcaaaaccgcagcagctcccgggatcgcccttccctctcgcggttcccgttcgctcttttcccgttctcctgtccttcaccccaccacctc

SEQ ID NO: 1851 - DNA, 141 bp, Homo sapiens
gagcgaccgagcagggtccgaacagagccagcgagggaccccgggctgtgcttgaggcccgacgacgcgccatatcccggcagcgccgcagctcaggcctctgcgaatctgtggtccacacgctgataaacttagaggcct

SEQ ID NO: 1852 - DNA, 142 bp, Homo sapiens
gggccggatgccggggacctgcggaagcagaggctgcgggggtagagatccaactccacggagtgagagagcagctttgcgctaatggggccgggtgcaggaagctggtgcagagaggaaagaaggaagggagtctgggcga

SEQ ID NO: 1853 - DNA, 293 bp, Homo sapiens
tgagcctcagtcactcccacttccgccccaggctaccgggaccgcagctatgaccctccatgcccaggccactggacgccggaggcacccggctcggggaccacatgccccgggttgcccagagcttcagaccctgacgaggccgggggccctgagggctccgaggcggtgcaatccgggaccccggaggagccagagccagagctggaagctgaggcctctaaagaggctgaaccggagccggagccagagccagagctggaacccgaggctgaagcagaaccagagccgga

SEQ ID NO: 1854 - DNA, 270 bp, Homo sapiens
tgtgataagaaaaatcacaattcccagaatgccgcggtgctacggcagccgaaggggccattccgtgtgcagcgctcccgcccaccctccggtctcggcggctctccagagcgtctgtaaacacccagagactgtcatggagggggaggaggaggcggcggcggcgaagggaggcgtttggggccgcctccagggtccgctctgccattcctgaactggtccctcgtccccgtgactctggcatcagggaagcgaactgttaggcgagag

SEQ ID NO: 1855 - DNA, 133 bp, Homo sapiens
gccctgcagcccgtccacagaggtgtgcaccttggagatgaacaccggctggtgggagccgtcctgcgagtgcgcggaggagccgccgccgccgcccccgccgccgccgccgctgcccccggaaactccgggg

SEQ ID NO: 1856 - DNA, 150 bp, Homo sapiens; identical to SEQ ID NO: 194

SEQ ID NO: 1857 - DNA, 388 bp, Homo sapiens
tgccagataccaggtggactagggtgagcgcccgagggccgggacgcacgcacgggccgggtaggatggcgctggcgtcgatgcccgcgcgcttcagggcctggtctggccgcccctccatccttgtcggtttctcgggtcgcggaccccgcgcggcgccgggcgatgctggcctgcccgtggccaccacctcgcttcattcccgtctctttgggccgccgcattcgtccacgtgcccgtctctccctgcgcaaaattccaagatgagcaaatactgggctcacggtggagcgccgcgggggcccccctgagccggggcgggtcgggggcgggaccagggtccggccggggcgtgcccgaggggagggactccccggcttgcgacccg

SEQ ID NO: 1858 - DNA, 189 bp, Homo sapiens
tgaagagagacacacaggaagcttgccacgtgacgacagaggcagagattaaagtgctgtagctagctgcaaatcaaggaacagaaaggattatttgcaagccaccagaagccaggaagatgcaagtaaggcttcccctccacgtttctgagggagcaggacaccgctggcatcttggtttcagactgc

SEQ ID NO: 1859 - DNA, 147 bp, Homo sapiens
ggcgattgcgtcgccctgaggaatccagctggatccggtctgaggcggcgcggggccagcgggtggggttttgagcggctggcgggaaggcaggttcctggcatatgctcgcttgggttctgttctgcaggccgaccacgtgcccat

SEQ ID NO: 1860 - DNA, 261 bp, Homo sapiens
cgaagcggacacccgcgcgcggtgattggccggttggccggaagaactctgtctctgattggcaggagagtcacgaaccggtcagccccgggtcaggggccgcaagtgaggacactacaagtgtcgaggggcctaggggaagccggggcttgggagggcagggctttctctgcttgcggacatcgcgaagggcctctggcaggcgccgccgggtggcggcgagacgcctccgcgcctccggggttccttgttcgctgtcgg

SEQ ID NO: 1861 - DNA, 136 bp, Homo sapiens
cggcggccaggagcagcagcacgggcagcacgggcggcggcggcggcgccatggcccggagcccgagcccgagccgggcgcccgaacacaatccatgcacccggcgcgcctccgcatccacccggcgaggccgggg

SEQ ID NO: 1862 - DNA, 155 bp, Homo sapiens
caagcattatagaacgtggggagcatgagaaatacacggaggtggaaacgccggagtggctggcgggtaaaggcagcgggcgcagatgaagcgggctgggcgtcccacgcgcagaaccgtcccggacagaagccgcagggctgcgctggctggaa

SEQ ID NO: 1863 - DNA, 137 bp, Homo sapiens
agcgaaggcgccgccagcccgggctgtgggcagagcgcgccctctgccgggcatgatcggaaacggcgcggcggcgactcccggaccctcgggactccggacccgactcccacccggctgagctttaccgggttata

SEQ ID NO: 1864 - DNA, 108 bp, Homo sapiens
atggagcggtcccaaggtcgtcagctccagccggcgccctgggccgcggggccggagagctccggagcggaccctcgccgcgctccgaacccgccccgcgcccccagg

SEQ ID NO: 1865 - DNA, 118 bp, Homo sapiens
atcctaaagccctgtgagggccgcctgctcaggtccccgggtgcagaactgtggggcgttcgtgggcggcgtcccgtttctgacacgcagtgtgatggggtggcaatggagggcaagg

SEQ ID NO: 1866 - DNA, 144 bp, Homo sapiens
agtccggacgaccctagctcctttcccctctggcccgcgcctctccagattctcctctagagctgcccagcctcgcgcccctctgaggggaccccgcaccgcgccacctccgcggtgtccccactccctaattttccctgaggc

SEQ ID NO: 1867 - DNA, 158 bp, Homo sapiens
tgaggcagggcccgtttcgtatcgaaacacaggttatcagagtgggagaggaaaacgagccgggacgtgtgttccacgcgtttcccaggccctcgctgtccgtgctcctgggctccctcttgtggttgagaacccaagacgcctgggtgttcggagct

SEQ ID NO: 1868 - DNA, 149 bp, Homo sapiens
agaggtgcatgcgggacgtcttgcgcggcgtccggtgcagagccagcagtacgctgctgttgcccagcacggccaccgcgaaagtcaccgccagcacggcgatctccagtttggccagctcctcgttgcgcacgtccctcggtgggccg

SEQ ID NO: 1869 - DNA, 155 bp, Homo sapiens
cccgggcggcctcgggcccagccacctgctcgccggggaaggtaggtccgggcaaggaggggcggggagtaggcgaggccggcgggagggatccgtgcccaaccccagggaatcgcacctagcccctccccggggtccgcgtcccaaactctggg

SEQ ID NO: 1870 - DNA, 430 bp, Homo sapiens
gccctactctccgcgcacccagagccgagagaaatttgactgccctaatcgccaatcaaaagagaggtcgaggatttgagccaatcgcagcgggcgaaaggggcgggccgtcggcgagcgctgaaggtctctagccctcccctgcgctttagcctcagtgcggagccttaggcggagcgaagagaaccggtcgcggcaatcctagcgcgcagcagcagcagcagcagcagcagcagcagcagcagcagcagcagcacccgcatccgctgcgggagtccgagccggaaccacacccaagtagctgccctttcctcttctgtcatctcaccgccccaccacagaccgcgttccccgaggaaaccggccgcccacgcccggagcatcctcccctgttgagcgggcgctgacggacccggcggcatgatgcggc

SEQ ID NO: 1871 - DNA, 138 bp, Homo sapiens
atgatgatacagttagctatagattatatttcctctgggaaatggatgcattttaatattgatatgagggcataccgacgtcttgaaatggctctggacagaaaaaggtgctggtttaacaaaaagagataacccagc

SEQ ID NO: 1872 - DNA, 481 bp, Homo sapiens
ttcaaacaggatcccaaatctttcctcgctaaggggaggggaggggtgttcggaggtggggtgggacaggaagtggggtttggatgggattgtgggataagatcgcggagcggatctggacccgagcctaataaaggcggtgtaaatacaggtgtcataaaggacggggcggggcgcgcggttgtcaggggcgcaagcgtctcggggctgccagaatggctccggctcagggcgcggcgccagcgcctgtcatgtcccagctgcgcctctgggtcccacggcacctcctcaggttggcaactactgtggctactagtccaggaggctcagcctctggagtgggtccaggaccggctccagccgacttccgaccctctggggccgactgagccctggttttcctgctcccccagtctcccacccgaatctccctttgcgcttacccccgacccccgcccccaccggcagaccccggggactt

SEQ ID NO: 1873 - DNA, 167 bp, Homo sapiens
gggagtcccctgagccccctacccgggccggggtgcgaggcgggttgggcgcacgtgcttgtggtcagggcgaggtgcgaggtgccgccggtgggcaacctggttctcttccctgagagtttggaggtcggctccctgctctggccagcgtgttaggaacctgaccc

SEQ ID NO: 1874 - DNA, 268 bp, Homo sapiens
gaagacctgctaggctcagggaatcaccgactgagttgctgtttgaaatgtgttatcctcagatacactgaaagccaaccccacacggaaaccttgtggttagccatatgtttgggacacctttggtgtttactaatgccctaggactgtgaagcagaagatccacaagagaaaactagagctgtctgaacagagaatgcaaggagattggaagagagccccttttgtttgtgtgtacgtgatcaaagctggaagcttttcaacagtg

SEQ ID NO: 1875 - DNA, 136 bp, Homo sapiens
tgtccgagatggggggctggctggagggtgagaaggagggagagaaggatgactgatttcacactccagagttaccgacgttaaaggcgatccgacgaatcctagggagtctttacaagtttggttaagaagccaa

SEQ ID NO: 1876 - DNA, 364 bp, Homo sapiens
gccacctgaaacttgacacgagtatgtctggaatagtggcaccaaggctccagcagaacaataaagtgcttgcctctcttaagcaagctgaatccaaaagtcccagagagggaaatacaggatttcccctggctgtcagcacagtgagtcagcgtctcctgcactaaacaatggatgaatacacagccacttagagacctttcatctttatccttttttagcaaagcatgtgccttcttttcataggtaggatcactgacgcctcacgctctgccccctcttcaccatcatctgttaaacaggaaatctgcaacactcttttcagtaaacgggaggggtctgctgtcaaccaaaatgaaggcaa

SEQ ID NO: 1877 - DNA, 224 bp, Homo sapiens
aaaagattttactcatttcaaacactacctcattcaaaaaggcgaccataaattcctgaggctggaaacgaacgaacggcaagccccgaagaaacacgctcttttaaaaattaaatcttgtgctactgtttcggggttgtaacgcgtgcgtgaccctcgtctttgagggccggatcctgcagggaagagagggcgtacctgaggggcctcgcgtgcctggacag

SEQ ID NO: 1878 - DNA, 147 bp, Homo sapiens
ggtgtctgcagggaggggcacctaggatggtaaggagagcccatgaaattcagttctgctgcatccctgtcgccccctagtgactggtgtgggaaggacagctatctggggagagacattctccctcccaagaggcacctcaagacc

SEQ ID NO: 1879 - DNA, 138 bp, Homo sapiens
ttttttgccgagggacgtttcaaaattttgcacggccagggtgacaaaaagaggatttaagagccacaagcggtccgcacatgacccagacttcgttcctgtgcggtaacgtagggagagaaggaaagggtgtggggg

SEQ ID NO: 1880 - DNA, 152 bp, Homo sapiens
tgggggcgtcctcccctctccctccggccccgcccgcaggttcctgggtctctccttcaagaccacatcccccagagaccggcggagtttcgcacagccttctgggacttatagttctttaaggacgcggagtgggctcacgccgcgggtag

SEQ ID NO: 1881 - DNA, 160 bp, Homo sapiens
cccgcgccgcgaggtcctaagcagcccgggctgttgcgcggcgctggcgggcggggacaccaacggggagtggatactccgaggctcaacctggggcctctgcccgccctcccctgggtgcggagccggacggcgggcactggcaacccccgggcccctg

SEQ ID NO: 1882 - DNA, 127 bp, Homo sapiens
agtgaaaccaaattctagtgtctcaggctgtaaggtagagtgataaaccacgaaggcacacaaggaaatgcgacctcagaccagcggccgcttttagagggagggagaggctgtggttttgatgggg

SEQ ID NO: 1883 - DNA, 142 bp, Homo sapiens; identical to SEQ ID NO: 563

SEQ ID NO: 1884 - DNA, 169 bp, Homo sapiens
aaacattcgcagaaccagtaagaggtaggagcggaccgactcacaaccccctcacccatgggccggacgcggccagcgagcccagagagacaaggcagaggaaataggaagagaaagagtatctgtgacaaacaagaaaaaaggaacaagagacgtaatagcagcactc

SEQ ID NO: 1885 - DNA, 132 bp, Homo sapiens
cctccccgcgctgaagggcagatcccccgctccccgatcgcccgcaatccccgcgaccaccggggaaggcccccgctgcagcgttcggcgtggagcgcccacttgcttctttgccacatcttctctctcctc

SEQ ID NO: 1886 - DNA, 259 bp, Homo sapiens
tattgcgaccgagcctctttaaagcagtagcggggcccgcggtcacgtgaggccgattcctggaaagttcctggaaagccgcctccgcagcagccgggcggggcgcgagcggagcgctgactggggagggaggcggggagcaagggaggcgcgtcggtctgggaagtcgcgcgcactcgctgctcctgggaccgacgtttaactcttgccaagtctcgtcgcagccgccgcggctggcgggccttgggcttcccctgaa

SEQ ID NO: 1887 - DNA, 323 bp, Homo sapiens
cactagcgttggctacgcgccggtcactcgggcgacaggaggcggggcggcgcggaagttatcttccaatcaggtgctccgggggcgggtccggaaaactgtccaatcaaggcacggggcggacaccgggaagcggattgcaggtttgcagtagtgtccaatcgaaggccccaggggtgaagggggcgtgtccaaaacgctgtccgctcagagcgttgaaagggcgggggcttagagattgtccaatcagggcgccgcttcctgagctccgaggccccgagggcgggacgtttcgtcctccctgccgcgcgtgccctgcctac

SEQ ID NO: 1888 - DNA, 323 bp, Homo sapiens
ggcgggtaactgtgttccggactcgcccgcggccgggcggagccagttgcctccaagcgacccgacccaccccgcgattgtagtcctagaggcggagtcctcgccagagttcagcaaaggttcgctggccgaggcgggtcccagaccggcgaacccgacagtggagggcgtgaccagttgtgcaaaaactacagatggtgccagtgagatcagtctcttctttaacagacaatattttgcgatgtttggaggggaagggtctacagcgttcaccacgttctcaaaatgcgccatggccaccaaagaggtttaaaaaaaattac

SEQ ID NO: 1889 - DNA, 144 bp, Homo sapiens
gcgcggccatgtgagcaagcgcagccaatcagaggctcgccctggactccgtcccgggctggggggcgtggctggagggcgtggccgggcggtacccgcggcgtctctgcgctgccgcctttgcttgcgcggctgtgtaggggg

SEQ ID NO: 1890 - DNA, 219 bp, Homo sapiens
tcgaacggccaggcccctcccctccgcgggaacttcccgagagcagcccgcggggcccgggctcaccgcggcggaagggctccagcagcacatccgaccgcttgcacagacgccgcagcacggcggctccccgcggctgcttcaggtccagcactagcgagcgcttgccccggcccaagcggctcacgtcgtagcgggagccgggccggtccacgcgta

SEQ ID NO: 1891 - DNA, 144 bp, Homo sapiens
tgcctgagccacggccgccctcgggagagaagcgtcgctgtttttctgggagaggccctgcgccgtgctcttcgtcggatattgggggtcccaagggcggtcgcttgcgacagtcgggtgccgggataagtgcgggccatttgc

SEQ ID NO: 1892 - DNA, 143 bp, Homo sapiens
cgccacagtcgagcagccagcgccatgacctgcaacttgcgggctgaccctgcactacttcaggcagctacggaggcgggcggggctaaaggagattcaatccttccggaaagaaccgcgcccgcccgcctcctgcacagcac

SEQ ID NO: 1893 - DNA, 144 bp, Homo sapiens
gccgcaggttgttggcaagcctggtccggggttttaggttgagcccaagcggcaatgcgggatcgccaccgggccgcgcgggcttgggagggtgacgcccgcgaggacactgcggcgtccggggcgggcgggcacactcacaat

SEQ ID NO: 1894 - DNA, 159 bp, Homo sapiens
agccttgggaatggggagggcaggcgtggtaaaaggtacaggtttgggaaggtcgctcggttccttccaatccaaacgagaggcttctgattgtttattctcacaccagagccgtgaccgagacccagaggtccgcttccggccacggccgaacagctg

SEQ ID NO: 1895 - DNA, 141 bp, Homo sapiens
aaaacagcccagttacgtgaggcagtgtccggggcttaacgtttccgccgagctaatagatttgggaggctccgaccctgattttcacactagcaggagggagggcgctgggtcaccctcctatgcagaagggcagccaag

SEQ ID NO: 1896 - DNA, 127 bp, Homo sapiens
ctttctccaaaaccaagaaattggcggtgcagctctgcatgacgtcataccacaggcactccaatcccacgtgggggagctcttggtcccgcctctcctgaaatggtgcgccacgcctcctcctctt

SEQ ID NO: 1897 - DNA, 545 bp, Homo sapiens
tccttgctggttagaggttttctctcggggcacagagcatgtggttttgcatttaccggggcatggtttgttgcaaaggcagggttctcattctcaggagcacatgggacagcagcaaaaggagcagcagaagagcaggctgccagaggatgtcttctgcagaggagcctgtgcacgggcagcgagaaggagagcggcgcggcgctcagttccagcctctgctggcctgtgcactcctgggaataactaactccttcaaaggcccggtcaatggctgcagtcagttcctttctgcatcttcttagtttttcagacatttctcctaaaagcgaccatgtctttatgtaatgcattggaaatgcacaggacaacacaataatgttacaaatgaggctgcaaactacccctgaatggccacgatttcctggagcttggccctggctatagcaggacccacaaccctcgggctttcctcctggagtaggcggttctcggctctcgcggaggaacccgccatctgccagaagccccaaagacgccccgcc

SEQ ID NO: 1898 - DNA, 138 bp, Homo sapiens
cagcggagacctccaagccggccccaggagacgggccgcgaggttaggttggaactcggcggcaaggaccttgaacgccgggctggggcggctccaggtgcttgggagtcgggggactgcggaggacgccaagtctga

SEQ ID NO: 1899 - DNA, 132 bp, Homo sapiens
cagctggcaggtcctgctctgcaggcctcaccgcccagctcccgggagggggccgagggcgccctgagtgctgcgcgccttcccatgacgcagttcctgtgcctttaaatcccactcccggagggggcgggg

SEQ ID NO: 1900 - DNA, 205 bp, Homo sapiens
ctgggccacacacaaaccccgcttcctccttcaaatttccgctgccggctttaccgatgcgaaagccgcggtggagtttagaccactcctcccggcgccgggctcagcccgccttcgccttccctctccccgcggaaccccttctcgtcgcccgaagaaacccgaaggtcttcggcaagttccgtccccagcgcgggggcggggc

SEQ ID NO: 1901 - DNA, 139 bp, Homo sapiens
gggcccgcaggtgcagtcggcccccagctccgccgacacctccaccgccctctgcagcaggtagcgcgctcgcttgcgcgtcagggcgtccgcctggcccagccccgcctgcaccgtcctccagaagcgccagcagcgc

SEQ ID NO: 1902 - DNA, 142 bp, Homo sapiens
ggaaaaatactcctctggtctgataccttccggaaagtaggagagttcccaaaagtcagggtttggaggggtggagagtgggggtagtcgtttgctttttaaaggcgacttctgaagcggttgcggctactaaaactcctaa

SEQ ID NO: 1903 - DNA, 146 bp, Homo sapiens
gctccggagggggaggcagggcggccccgcgctgagggtggaagcgtgaacatccgagcagagagagcggggaggggccgtccggagagatgccccgctggcccgactgtggcccccgggaaagacgccggtcccgtgagcaccgc

SEQ ID NO: 1904 - DNA, 157 bp, Homo sapiens
agatatacagcaaggctggtgaataaggagctgaggggcggaggaagcgggagcgagggagggaggaaaggagggagtcgccaccttaaatccacgccggaccgggaacctgcagcccacaacctgatccctgccctccccaacagtggaccggcca

SEQ ID NO: 1905 - DNA, 153 bp, Homo sapiens
accgccgtccgcacctcggtcagtgcgtccccggcaggtgcgtgtacctgattcagtccgtgcttatcttgcgcatacgggccgttcagtgtcccgctcggagctcgtcgccgccgcagccttgaggctccgacccccgcttgggccccgtcc

SEQ ID NO: 1906 - DNA, 151 bp, Homo sapiens
tgatgagcagccaaaataagctagtaggtgttcccacaggcgagggaggcagtgttgggcaggaacaatcaaaagagcaagagaaagctgacacagggtgtgcaggactcagacgctgacacctcccctgggagaagtggcaaagaataga

SEQ ID NO: 1907 - DNA, 134 bp, Homo sapiens
gccgatcttccagtccttccagtccacctgggggttgttgtcccgcaagctggaggccacgctacgggctcgacgggccccgtgaggcgggggcgggaccctcaggcgctgcaaggggtgcggcagagtccccc

SEQ ID NO: 1908 - DNA, 106 bp, Homo sapiens
gaaagggtgggggagtcgcccttgctcccccagcctcagccctcgggaggcgcagcgtcagggcgggcggcagcacagaaaccccccgcgccgctagagggaccct

SEQ ID NO: 1909 - DNA, 139 bp, Homo sapiens
gtggagaaagtggagaggccggggttcaacccagcagactcctgcagaccgggcctcggtcggagacgcgagcccctagcctagctaggttccttcgtcgaccttgagaaaggggcgcggatccgtgtcccgcagagga

SEQ ID NO: 1910 - DNA, 144 bp, Homo sapiens
ccccccgcggcgaggctcccgcgcgcggctgagtgcggactggagtgggaacccgggtccccgcgcttagagaacacgcgatgaccacgtggagcctccggcggaggccggcccgcacgctgggactcctgctgctggtcgtct

SEQ ID NO: 1911 - DNA, 175 bp, Homo sapiens
cgagcagagagcagcgcttagagatcgccgcttggagatcgcccggcggctgcggtggtggcactgccaggggctgtctcgtcccgagggcaccgcgacccgggacgccccgcgctccccaaggcctcggcacctggggtccggccggctctggggaggggtccccggcgtgccc

SEQ ID NO: 1912 - DNA, 241 bp, Homo sapiens
atgctccaagctgctcgatgtctgactcctggagccgcagctcccatgactttgtaaagggcatgcaccctgcagggcatgtgccccaagcaccaggggttcctcctactctctttgctttcgaaaatgaggcagcaggaagtgatggagagcgctgtggtcatcaaatgtggatgaagttaaaatttgttaaccaaatgcaaacacttcggggagtgaaagtggggcactattcattttt

SEQ ID NO: 1913 - DNA, 166 bp, Homo sapiens
cctggtggaaaggctgggagccgcacagccctcccctcctgcgctggaaaccctccctgacccccaccctggccccccgtatccccagcccttggcaacactggagtgcacacgccgccacggttgcccagaaaaagtgcccaagctgctgacgcaaacaacaaca

SEQ ID NO: 1914 - DNA, 153 bp, Homo sapiens
gggcgggtcccggtctgcatcgccgaccccggggcctgacacccggagctgcgggcctgggtggggtgaagctccctccgccccagcccggctggtaagaagggaggattccgcccttggagacgacttttaaaacgagcgcggcctacctcc

SEQ ID NO: 1915 - DNA, 146 bp, Homo sapiens
cggcagatacgtctctaatggggtcggtaagggggactgccctcgggtttcatttcacccgggaggaggtcgcagcgccctcggggacccccagtgtccacggtcggggccggggctgcggcgggtcgagctgggccgacgggtac

SEQ ID NO: 1916 - DNA, 154 bp, Homo sapiens
ggtgaggggctagggtgtggggggcgggtgggactccagccgggagcgggtaacccggactagagtctcgcccccactaggcgggatgaccgctggcagatttgtcggcaaagtttcagtttcttagtctggcggctgtcatcttcccaggccg

SEQ ID NO: 1917 - DNA, 135 bp, Homo sapiens
tacacgttgtagacagaggcagcataacagataacaaggacgctgacgtcagcctacctgtgatcgaatcccgactcagccattaagttacctctgtgacttaaatagcccaggcaagctatttaatctatctga

SEQ ID NO: 1918 - DNA, 364 bp, Homo sapiens
taggaagagagagagtcggtaaaaaaataccaaagtccattggaaaacggagcacaggaaagtggaagagaggaggaagggggaaagattggagaagatttgcagagggcaagaaatgagtgtgttgcgggaaagtgtggaaaacaaaggcagagagtaggtaacaccagacgggacactcacggttgagctggcgcctccggatcctgtccctccatggcctgtttctgatccagtgtaatcgcgaaggtaacaccatggtcccaacagagcggcctaaaacctgctcatggcaaaggaacaaaagggtcttgcagctatcctggaagttaagtccagacgtataaaaatgaaaaagaaaact

SEQ ID NO: 1919 - DNA, 276 bp, Homo sapiens
gtacagaattgcgcgtgcgcgcctgcagcacgagccccgccccctggctctaaaccgggtggcgggaaaagggactcagcgtttcccgagaatgcccccatagcttcgaaaggatccccgtgtccgcttagcgccctctcgccacacactcactcacccgctccctgcgggtcctcagaagcccggaggagccaccggccctctggcgcggggccgcagcctttccgccaccaggctcagctggaccggtccccgcctgcgcgaagagcgaggcgg

SEQ ID NO: 1920 - DNA, 821 bp, Homo sapiens
ggtgaaagcacagcagagcacagcctcggaaatgtcagccctgggcaggacactcctcgtttaggcctcggcaagtctaaggaaaatgccctgtagcaggaagtggcatctgagtaaagaaccatcgagtggtgggttgtggggaaatatgtcagtttgttgaattccactgctttctgaagaacagtgttgctaatctctttattttggggtggtttttaaacttgcagctcctggatgaaacggccacactggtcttctttgttctaacggggtataaattccgtccggcttcagataacccctacctacaactttctcaggaagaagaagacttggaaatggagtccgtgtaagaaatctttcttccctcttccttagccctgacccctttgcctaacacaaagcagcacagtgtgaatcgggtcggctgctctcagcatttcgtggctgcaggggtggttcctctatttttagcagaaggaagcggacactggagccccaggctgtctgatctggtttgaagtacagtatctgccaaacctagctgggtcttgtcagggaagatggaacttgccgttccactaagcatcattggagcctgctttcaagaactcagtggcaagaacttaggaatatacgtggccagttcacgagggagaacagggggccgactttctgtcaggcccgccatcaggcgcttacgtctgaaaatggaatcttctgagtcatctctaagtctgctaatgatcctcagacatcctctatcgtcagataactgcgtggcttttcacagcacaatgactttgacctatatctga

SEQ ID NO: 1921 - DNA, 153 bp, Homo sapiens
gtggggagtggcgcgggggtggccctgggaccgcaccccctctcgtcctggctgtgtgggccccgctttcccccagcgctggagactccgagcccggccggtcccacattccacgcgagctgaattcccgcccgcatcccgcccgggcagcag

SEQ ID NO: 1922 - DNA, 156 bp, Homo sapiens
gttagtggaggaggctctgtgtggagaagctgggggccggctccgtccctcggtggagcatggtcattcccaaagcgtccccttcctaagggggaaaaagaggcggtcagggcttgattcgcgtgtcccccggagggtgagaaaaatgcattccga

SEQ ID NO: 1923 - DNA, 285 bp, Homo sapiens
gcagtgtgtacatccaaatctacacctcggaaagagcagggactgggcccccagccttgcaagatccctgtgaagactggggccgacgatccaaaaactaagagccggggcaaggtgacccctccgcaagggtgcccaagctggggtacacactgtgttccctctgctcagcggtcgcgggtccttcgggagttgtgagccccgcgccactctggtgggataggtcttccgagtaccacaggaagtctcctctcccagtagccccgagggtcggagatcccacgg

SEQ ID NO: 1924 - DNA, 152 bp, Homo sapiens
ggagagacagaagaagctggaggccggcaaagccaaggtaggagagcccgaggcaaccgggcctgcggtgggaggcggtggctagcacggggtgggagggggcctgggaagcggagttcgccgcagccccagtgcactgcccgagagggagg

SEQ ID NO: 1925 - DNA, 138 bp, Homo sapiens
agtagcacccattttaacaaacttcccaggacgacagtcagaaaatcatagttacagaaggcaggctggggagaggcggtttctgggtctccgaatgaggtcacacaattaaaattaaaaaaacgaaaccaaaccaac

SEQ ID NO: 1926 - DNA, 58 bp, Homo sapiens
acatcccaggtccctgttctcgcagcgcccaaatagcaggggaggggctccaggcagg

SEQ ID NO: 1927 - DNA, 138 bp, Homo sapiens
cgcgccgccgccgccgggccgagttgcgtgaagtgtgtcacttcgaaaggggctacggggttgcacggaaacggtgccgcagcgtctcggccgcgctcggggccgggcggcctgacacgccctctggggaggcttcag

SEQ ID NO: 1928 - DNA, 142 bp, Homo sapiens
tgccaacttctgcgtgaagccactaaacttgtagtacatgacgcccagagtccggcttcccgcatccgctgccaacgcgaccgccccagagaaggaccccgcctccccggctgtggtcccgagactcagcgcaaggacccgg

SEQ ID NO: 1929 - DNA, 146 bp, Homo sapiens
gcaggcagtaagcactcaaatccgacaggagctactgtcacgaaaagcgggtttgcagccttggcggctttatcgccgccgaggactagggaggcgggccaggacatggggacccgaggacctgaaagactggaagatgcccgctg

SEQ ID NO: 1930 - DNA, 539 bp, Homo sapiens
cctgtatcagctccccatccctcccccggcacaggaagtgtgtggaggttctggagggctgagccgggggcagggctatgctgaatccagggacctggggttgcagggcctgtgtgctttctctgtagcttctatgaagcccagtttccctgtggatgaaatggggtgagagcactcggccaggcagatcgaatgcagtgccaggagaagggacagctctggggccacgttaccctccctccccgcagcgggtgctgaggaaatgtcactgttgcatcaaattagccacttcctgtgggggtcgcctggcctcgggacaggggagctctggtgtctgttctgtggtctgtcttttgtgttcagagacctggggagagccacactggaaggccgtgcttggagccagacagggctgtgtgtccgatggggcgcctgtatgcagcctgtagcagtgtggggccagccccaccatctcatccagcgtgggggcacgccatggacggtgcccacccctgagtgcagcttctcggtgcacagac

SEQ ID NO: 1931 - DNA, 272 bp, Homo sapiens
cccgcccgtgagtccaaccggcgcctctggccaagaaaggcgagctgaaccgggtgcggttagctatgcgcatgcgtcagcgcttaccgcggacttgctactcctcgcgttctcctctttcttcctctcagtgcctggacgcagcgccctcttgcgacagggaggaaataatgcgtcgagggggcatcctcggccaccgccctggtcctcaggctttcctcgtacctggtgcgtctgctgccactctgtacaaggtgcacttatctctttaa

SEQ ID NO: 1932 - DNA, 149 bp, Homo sapiens
tcattacacaggagaaggtactaaagcaccaaggcggcgtactgcgttagaaatctcccgtgacttcctgctagagacgcccctagctgtgttgctgctgcttgtcagatccttcctgcgtgctgcacagtggagatacccaggttttc

SEQ ID NO: 1933 - DNA, 106 bp, Homo sapiens
gagttgggaaggggtggctagacgtcgcaggccccgccccggccggtaccaactcaccccttgccgccggccccgccaggcttcggccgctttttgcgacgcttgc

SEQ ID NO: 1934 - DNA, 285 bp, Homo sapiens
atctgagacacagagtgtgagcctggtcgagaagcgggaaaagaacccgcccagagccccttctctccattccctcggcgaggcaggaagctatctgcgttccgaatcccgcgacatcaggattatctcgcactgcagcacagagaccaatcgctagtaacctctgcctttaattaggcgttttttggcccaaatctcgcggcttcgtaaaaatatcgcgatgcttccgcttttaatgtttttagtttggacaagccctttgagataaatttaaaagccaattct

SEQ ID NO: 1935 - DNA, 136 bp, Homo sapiens
tggtggccgtgttcaggccgggcagcttgtccaggggcctcaacaccgacatcacagccgcaggaccaaccgttgctcctgcggtgcgcgccgatctttcaaaccgccctgagtccagcccctagagcgcggcctg

SEQ ID NO: 1936 - DNA, 134 bp, Homo sapiens
aaagaagaccagagccagccgggtggcacagcggtgtcgtggccgtgttgctgatcgcctgggtggttgttggcgtgtccctgcagcgaaggatcctggttggtaaggggagcggcgggcgagcaggcgggcgg

SEQ ID NO: 1937 - DNA, 178 bp, Homo sapiens
ataaataataaaacctagcccggactgtaatcacgtccactgggaactggcgcagtagtggaggggacgcgatcaggcccgtggctgcgcccagagcatgataagccagggacctcgcggcgcaggcggagggagggagagcgtcgcggacccaggcggggacagggagacgccgccg

SEQ ID NO: 1938 - DNA, 236 bp, Homo sapiens
gaattatctctagtggttttgcctgctaatcttctttttccctgaaagaacaccctcacggcacggcgttttccttaacggtcaggcgttttcccgggcagcttacctgctcggcctgggtctttctggacagcaggcgctggaggtgcgcgtcactgtccgccgccgtgtccgcggctgcgccagacagtgtagaacctgcggcctcgatgtccttctcccgtgccctattgtgg

SEQ ID NO: 1939 - DNA, 138 bp, Homo sapiens
cgcagcccgagagcccccgggtgccgcgcctctgcccgccggactgcgggccgccgcctcccgacggtgcctgcagaacgccgggaagcccccgcctcacctgcggggctcagagcctcgggtccccagggtccagga

SEQ ID NO: 1940 - DNA, 175 bp, Homo sapiens
ctagaatgtcagcaagaggggacaccgggtggttctagtttccttgtggttggagtctgttgagttaacagcccaaatctgaccacacaggcttggaacagtgtgcaagggagcaaccgagaggaagttagccaatgttggatccgggccagtcaacttctaagaaaacgtgcca

SEQ ID NO: 1941 - DNA, 155 bp, Homo sapiens
cctgcgggcaccgcagtcccagtcgcccatgagctggcgaaggtcggccgcgctccgatccccaagagctcccgcgggctgggcgcgggacgccgggctcggccttagcccccgggatttagagcatcctcgcgaccacccggaggcttctgggg

SEQ ID NO: 1942 - DNA, 145 bp, Homo sapiens
tgaacaggtcctgggccgacagctgcatctggactccaggctcgcccaccccggcagtaacagagcagcatcgcgcagcaacctgcccgcggggggaaacagcactggttcctcgccctcatcagccggccctccgcgattgtgc

SEQ ID NO: 1943 - DNA, 154 bp, Homo sapiens
accgccgggtcgcagaaggggagaagatggggcaggggcagaaaccctcttctttcctgaagtaaagattcgcaaaacttcagacattttcatccaggaagtaggaggccgcattaaaagaagtatttgtggaagatttcgcagcctcaagtgc

SEQ ID NO: 1944 - DNA, 332 bp, Homo sapiens
tcccgggccttcccattggacgctaaggcactcgttaactgctgtgtaaacgcagcctgacttccctcacctcaggcgaggcccgcatcaggcccctctgacctaggacctcccgatccggccgttatcgccaaccgtatctgtgtggtttcgtggaggaagcgcggtggaccttgaggggagggtacgcgcaggcacaataaagcagaaagccgctataataatgatgataatgaagaaaaacaaaagcatccattcgtcacttagtggcaagcgtttttccaactactttccgagtagtaactgcttgccagagtttccccagcttgggc

SEQ ID NO: 1945 - DNA, 147 bp, Homo sapiens
gctccgcctctcttagtccccgtgattcccgccgcccaataggatcgcgccctgtaggacgctcccttgagccttggcggtggcagccttttagtctgttccggtcttccccactggttctcttgccccttgatcctgaactcctcg

SEQ ID NO: 1946 - DNA, 205 bp, Homo sapiens
ataatcataaatgagataagcacgaagcaatgaagacaacataaaaaaacctggcagcagccaggggcaggtgtttcccctgctgcagttaatgactctgtgggagcctgctgcagactggaaacacgtgcaggagcccccgaggcccagggttcagggggctggggaaccgaggggtagctcactcattctccatgtccattct

SEQ ID NO: 1947 - DNA, 152 bp, Homo sapiens
gggaggccggacgaggacgacgagatctctgccattttggagcccaggtcgagcagcgagtaggggctgcccgcggcggcggcggcggcggcagcggcggcggcagcggccgactgcgggaagaagacgcgtgcggcggcagcggcggcggc

SEQ ID NO: 1948 - DNA, 150 bp, Homo sapiens
tggagacctggccggtaccattctccatagtgcagatggggaaacagggttggagagagggggcctcatctgggtcgttaacaatgcggtgcgtagctgtgagggagtttacacttctgacttcgggccttggctcctgggacggcgcac

SEQ ID NO: 1949 - DNA, 529 bp, Homo sapiens
acaaactttgaaagcctctaattgctgcgcctggtggcaccgtggaatgaggggaggccagccttctcggtgcggaatctccttggcccaggccttcccaggctgcccgtcccgccgcggctcagggcgcctcccggctccctgccgcctcccagccggacgcggacgtgcctgcgcggctctggcggccgcgtctgccgccccggcgcccgcccgggtcccaggccgactaattaggcccggctacctcccgcgccgcccactgcccgctccaggcccgctgcccgctccaggcccgaggtgatggcggctgttcctgccgttctggggcctgtgccccagagctggccgcgtttctcggggcgggagccagctctgctcgcctggcttaacccagacgagcccaggacgccctatccctgaaccccatcgtggcgtgcaggtctgagtaggctctgggccatgccggggtacctggcttggaggctctcttcagtctcgggagagatatgcttatcccaggcggagc

SEQ ID NO: 1950 - DNA, 142 bp, Homo sapiens
ctacgaaaccgcacttttttgtggggtagctgaaaccgattttaagacagacttagttgggggggtggcgagctaaaacgggcattctacgggagctggaagacttctggggcgtcccaaggactttgagagacttggagaa

SEQ ID NO: 1951 - DNA, 374 bp, Homo sapiens
gaagctagatccgccacaaaaggataagcccttccccaccactaacggaggaaacaagttggctcgggatcccgggacgcagggcaccagcagtccctactcttcccgggaaggatcaatctgaagtccccggcggcaagaagagaagggtgctcgaggccgccgccatcttccccaacggaacttcccaaaattcgcgagataaaccgtggtcctgccagagagaggaagaggacagggcatcgaaatctcgcgaatattggtcaatgcgtcggcctcgcgagatttctttcagcgcagtcttccctttgatctgagctgtctcaggcctcgcgccgctggatattaaacctgccggccggtagctttcggct

SEQ ID NO: 1952 - DNA, 138 bp, Homo sapiens
tggggtagtggctttggcggccgcctcctccagctgtgccctcctgacattgctgcctcggcggctgccgcccgctgctacgctgtggctgctgctggattcgcagtcccagccgccctgcgtccggtgggcgagtgg

SEQ ID NO: 1953 - DNA, 150 bp, Homo sapiens
gggcacaggccatacccccctaagctcggcatcgcctgcacctctcacaggtgctctgtccgccacagtaacgcactatggaaaggaaagttgtacggcgaacgactgaaggagccaaacgaggtggatctggagcggccgcaaggtgcc

SEQ ID NO: 1954 - DNA, 109 bp, Homo sapiens
ccccccccaccacaattccacgcccaaagtaatgattggccgaaagaatgcagccctgcgcaagcattggtcgcgccctccccgtccatccgaccccgccctcgggcca

SEQ ID NO: 1955 - DNA, 173 bp, Homo sapiens
ccagccgcgtcccgcagcgcggtcagtactctctgccccgatggggcgagagctccgggaacctgccccctgcccggagcggcgctcggagccccgctccacctccgctcactcgaccgctaaatccctgggattcgggagataatctgcaattcgcggggtggaaaccactg

SEQ ID NO: 1956 - DNA, 155 bp, Homo sapiens
cccgcccgctggcgcgggggccaggagtgcccgggggattgagttgcagccggggtggtgtcggggtttcccggctcagcacattctcccctactccccacagccgccccgatattaatagccctgccgcagcccatccagctggctcagagccg

SEQ ID NO: 1957 - DNA, 135 bp, Homo sapiens
aaggaaattgagacagaactctgggcaaggccaggcgtggggacccctggggagagtgtgtggacgcccgcgggtctgggtgcctcccagggaaaggacgagtgatggacagaccgacggaaggacagggagtgg

SEQ ID NO: 1958 - DNA, 145 bp, Homo sapiens
ctcacccactgccctcattcaacaagctcagacacccaacgctccccggggccgggtcttaggcgcacattggctcgcggtgcacgtccactctcctgtaggctcgtgcccttgacatatccggggctgtcacagtcccatgccc

SEQ ID NO: 1959 - DNA, 282 bp, Homo sapiens
ccttaagggagggaaaccctcctaccgaatatagtgcgagcctcaatggtgggtctgtcctggggcctgggcagggcgccgggtctccggactcaggcaagcaccttctcctaaccgcaagcgaagcgaggaggagcgaccagagcgcttcctctcccgccggagctgagtcctctgggccgcagtccttcctggacgagctctgaggccgaagatgcgttgcgtgactatgctgctgcctggacgcggggtctctagtccggaggcacggaaggacctgcc

SEQ ID NO: 1960 - DNA, 200 bp, Homo sapiens
gctgacactggcatggcttgggagggcgccgacctgatgttgtcagctaggacggccctgccctccgggaccagagagaaaccccaaacctcagcttctccttgggaaagcagaggcttccctttgtggtttgggagcaaagccagctccttgaccctgtttgactcggccatctggggcttagtgggctgtgagatctt

SEQ ID NO: 1961 - DNA, 238 bp, Homo sapiens
cgggcgcccgcggccggcgagcccggatcctcacaggggcggggcggcccgaagcgccgctgcagtccggcgggcgcccgcgagggcgcgagtgccctccgatctcttgcccactgtccggctccacccccctatgcccgggtgtgcgtgtgcgagggacagttccgccaagcgccgactacctccccgccatagccaggagaggggatcctatggggcgctgagatctggtcgcctt

SEQ ID NO: 1962 - DNA, 183 bp, Homo sapiens
caccaggacatcgcgggagcccagcaaacgcgcttccctgccactgggttagggaaggcttgccggaaggacgatttcggaggacagcaggtgttagccaggcagcggagcgagcgccaacaggcgcactggggcggagagacgccgtgagcaaggtgaggcagagggcacgcgcggcgccac

SEQ ID NO: 1963 - DNA, 215 bp, Homo sapiens
tctatgtcagtgacaaaaatgacaccgcctcaggatgggtaaatctaaaaatatccccgtgagaacaaatgacagccaagtagatcattctggagaatactgagcagcgcagcagcaactcgcggcagagactgctggtcatcagaggaagtcagtgtgaagtcagccgaggcaggggcaagggtgccgtaactgcattattacagaaaacaaag

SEQ ID NO: 1964 - DNA, 462 bp, Homo sapiens
gagagattgtgagaggcaggagagagacggggagaggccatcagaacttggggagagcagagcccgcctgcttcctgagtgaagcattgctcaagcgctctctgcccggccccctccgagtgtggttttcctcccaggccagcaccaaacccagaatagagtggctgacttgctgattgaggtcggcagctcccgagaagcaggagaagcagagtttttgcagtaagtacatcgttggttattatttaagacagagatggaaaatcttaggatagctggggaagaggtgcttctgctttaggtacaatgtcttacagacccagtggatcttggtgtgactaaggcagtgtgaatacattctcccgtggtgcatggactggataagttaatgccacatgcatgattttggggggctgaaaaaggatttgaaacccaccttttgacgtgttgaaagaaaatgat

SEQ ID NO: 1965 - DNA, 117 bp, Homo sapiens
gacgcccgcacactcagcatcagtaccggcacccagcacccagcaccgagcaccgagcacgcagcacccagcaccgatcaccgagcagagcaccccgcacgcagaacccaccgagag

SEQ ID NO: 1966 - DNA, 212 bp, Homo sapiens
ccggagccgaggcccccaagccaggacgacatcgcggcgagtttagagaacgacccggtccgctcggaaaaaagaaaacgtttagcgccgccgggcgatccgaccaaatatccttgaacgcctgccttcgcgagacaggatacgataacacaaagctgggttctcaggcaaggccgactccaggttctgcctagaaacgcagaggcctggcc

SEQ ID NO: 1967 - DNA, 394 bp, Homo sapiens
ccgcccgcaaaagccttcgacacacctgcagggtctcggcctctgctcccggcccgcgccgggcccaggccccgccctttgcggcccagcccagacccggaggcaccggagtcctctccccaccctagggcgtaagaccaaaaaaacgccaatgccagaaagaagacactgcacatgcgcagaacgtttccctagccctactccagaactacgcttcccagaaggcccggctgcgactccatcttggatgacgtcgtgaggcgcggccgcctccagcggcctgagtgattgctgtcgggtttccgggagagggcgctgtccttgctcagtgatggccggagagctgcaccctgcacgtctgggcttgaagacagaaatccaccgtgaggtgctc

SEQ ID NO: 1968 - DNA, 1452 bp, Homo sapiens
cggggcagcccggagcctagtccagaggcggccgccgatggccccacggtttctcctcctgagcgccgcgctgaggatcccaacgaccagatcccgggttccccggggccctggctagtgcccagcgaggaacggctctcgcgggccctaggggtccggggggcagcgcagttcgctcaggagatggcagccggaaggcggagacactgagcctacctctgacagcgcggggctcactagttaccgcccaacctggatccggcgcgtgtggccgctgggcacttggcacctccccaagagcttccacttggtttggtccccccacccgctgctcagtggctctgaccacactcccctcgcagcgtcagtggtacgacccttccagccggctagcctgcgcttctggttctgggagggggaggtaataaaatggttcgatccggtcttgacttgccaggcgctcgaggcggggtggggctgcccgggccactctgtaaaggagcaggtgggtcgatcctgcttgagtaatcgctgacgagcttcgtgctgctgctttcctgcttgcacatgttatctttgcttctgccggtcctcagtctggcgtgctttctttttctcttcgccgtctcctgctcctctccttattcattaatttcacctttttggaggtgtacagggtctcacacataaattattgtgcatggcatggagaatgcagaggtgagcctgtcgtggcaggactgcaccagtgtatccacagtcctgtctcggaatcatacagaccctcagctgacgtcgggatagcaaggctagaagcctagaagcagggcagcttccttcgccagaggcctgcggtctcccacttccggcctagtctgccagcttttgctggcacgtaggctaccactctccgggcaccggctggggccctggagccccctttggggcggagtggggaaggtgtgagtcagcgcccctggacgggccgggctaaaaaaggctgttagaacctttgggccgtgcccccattttccgtacatggtgaagaactgcagccgggcttgtgtgcacacgccacacactgggcgttcccggcacgggagaggcccagagtttccttcaccctgggaacagagccctacagccagggcttatatggccagcgggactccaaccggggtagccgcgaggaaggcgctggcagaggacagaaatgtccagtcacctccgctgtcaccacatcctgagcactcggccccatccccccacaggagggaagctgtggtctgacggaatgggcaactttcgcccctgtggggaggggacggggaaggaagaaagaatttaaaggaccggaatgcgagagtccaggtggccttggagaggaaagaggaacggtgaagacaagctgcgagagctgggagctggagggtgaagaggtgaacacttgag

SEQ ID NO: 1969 - DNA, 268 bp, Homo sapiens
atgtgcgacaagcagctatagctagggtttggccgcaggctcagagaagcgcatgaatgagctaaagccacaaagcgcggggctggaggtttggctcccaagaagcgaggaaatgggttcggaactcttctgccaagtcccagtagatctacccggtaaacttccggtgagtttccaacttccgtgcggggcagcagcttcggctggtcctaagcggaccggaagttcgtcaagtttcacgctccgcccctcttccggacgtgacgca

SEQ ID NO: 1970 - DNA, 146 bp, Homo sapiens
gcccggcgacgggggagttcccgcgagtggcctcgcgcccagaccgtgcggggggctgttcgggtggaggcgggggagccgccgggacaccaaaataggagctgcttgtggggtggagcggcactagctggcggcttccgagcgcc

SEQ ID NO: 1971 - DNA, 355 bp, Homo sapiens
gcattggattagtggtcaccaaagctgcggtcacctagtggggtgatcagaggctcctcccttaagatcttgattgccaacgcctctggcccaactttcctttttatttatcgcaagcctcctggaatctcaattgctttttgcccacccggtgtgtcagcacaagaaatgagtcatttcctcctttaagcacagttgaaattgagctgtgagtcagtgaggtgtgtacgatattgtcaaagcggggtgtgtacagtattgacagatctgtagttgggcaagagaattatcagagtttgtgaccacagcagattccaaagctcgactcattttcttctctcttccttcccttttt

SEQ ID NO: 1972 - DNA, 260 bp, Homo sapiens
ggcccgcgtcccagaggggtccacgcggatgttggcaccgtgcacccgatggaagcgggtgggagggggctccgggcgctcgagtccccagagtgcacccgaatccacgggctcggaggcagcagccatctctcggccatagggcaggccagctggcgccgggggctattttgggcggcgggcaatgatggtgaccgcaaggcgaccttgtaaggcatttcccccctgactcccttccccgagcctctgcccgggggtcc

SEQ ID NO: 1973 - DNA, 294 bp, Homo sapiens
gaggactagagagcggccgcaagacacgccgtgaggacctgggccactccttacccgcctggggcaggagaccccctcgcagcatccccgccacggccgcagccatctccaccggaagaatggacggaagccgagtggagacggaaagagctaaggattgtggggtagcgaaccccggggccggaagcagtgggcgtacccgccggctgtagccgtaagacgcatgcgctaggccgggccaacggagcccgcctttacctccccactcggcgtccagtctcttagcaacgactc

SEQ ID NO: 1974 - DNA, 271 bp, Homo sapiens
cactcgacgttactcctccgtagtcctgcaaagccaggttcctctggcagtcccagccggacccggcgtcttccgaatacagttacaaacctcgggttgtgcggtcgtatgcgcctcctcacgcctatccaagcctcaagcctgtccccttccgccctatcccgcagccgcccagccaagcaacattgttccagaccacccgggccccgaagagcggcccccaagtgctcggcccacccccaagcactcagtctctggctcaggattcgcg

SEQ ID NO: 1975 - DNA, 139 bp, Homo sapiens
agcacatcaggtcccagccacaggatgtggtagggtgagatttgaaagacagccgtgagagaggcactcttttcttgctgtggctcctggcccaggacggttgtttcagtgtccagtctctagcttctcagatgttgaa

SEQ ID NO: 1976 - DNA, 141 bp, Homo sapiens
agctcggcgctatctttaaaaggaatgagttgtggctcctaactagcttgccgaggagagcgtagagtgacacgggacgggggcccagggcactgaggccaagagttcccgagtcacgccagtgctcgcccctttggcctt

SEQ ID NO: 1977 - DNA, 202 bp, Homo sapiens; identical to SEQ ID NO: 491

SEQ ID NO: 1978 - DNA, 146 bp, Homo sapiens
gcccatcgggcaggcggaaaaagcgaacttgtgtctcggccgaccctgccgcagccacaattcggcaattcggatccggagcgcactctcactcaaagtttgccaaccgccattcgttcgccctccgggctgcgctgcctcaggcg

SEQ ID NO: 1979 - DNA, 145 bp, Homo sapiens
ctcctcctgtccctggcctcagtctcccatccgtgtaagggccgggcagcaaggctttcatcctttgcaattgagagaacgcttcctgattgttctcatggcttagaaataccccttgatttgcattcgaaggaaataaggaggg

SEQ ID NO: 1980 - DNA, 160 bp, Homo sapiens
gagagtggctgggcctcttttgccttctcgggcctgcacgtggtggtggtggtgtaggtgatagagcaggaaccccgggcgttggaggatggggtggggtctgtgctgtgctgctgggaggggctgcgctgcgctggcgcacggccaaactctgggaaac

SEQ ID NO: 1981 - DNA, 182 bp, Homo sapiens
aacccaaggaggacgaccaggaaagacgggaactcgcgtagacacgcccggaagcccttgtcatgtaaatagctgtcggggactggtgtattgtcgccgccccagccggcgggacctggggcgaatccacacccattgtctgctgcccaaggggcctccggctggggggcgcggctgcggag

SEQ ID NO: 1982 - DNA, 116 bp, Homo sapiens
atcctggggcaactcctcgcacgatgcaatgccaccagttccggccaggtggcgctgcgcggctactgttccgggcggtagcgtccgactcgcgcctccagcaacgggcggggcta

SEQ ID NO: 1983 - DNA, 148 bp, Homo sapiens
aggcgttttacagatcccgagaccacccctaagcaagacccctagccggagtcgcccctccgtcccgagactccgcgcccctcaatgcgtcacccttctgagcgcccggcctatctggccccggagcgcagcctgtaacgctctcagc

SEQ ID NO: 1984 - DNA, 134 bp, Homo sapiens
aacatatcgagatgcttttcgccggcttccatcactaacctcccggaggtcatcaagccaaatttatgagtggccgctcgagtcacgtgactctatttaaggctcccttatttgggaagagcgcataggataaa

SEQ ID NO: 1985 - DNA, 216 bp, Homo sapiens
cctcccttgcgcccgccctcccacgtggggcccaggtctgggaatcagcgctcgggggtggctggggacaaccgagaacgagcttcttccccggcacgcgggcggaatggctgagcccagcctggaagcccccgtcaggtccttgggggcgggcgggcgcgcgaagcacagggcggagacagccgggagcccagcctcccgggctgggccgccctc

SEQ ID NO: 1986 - DNA, 132 bp, Homo sapiens
ggccaggtgagccggccaccgcagaccggaatgagagcctgggaatcacgagctccaggtccggaggtaggagctgggacggcctgtggtcaaattatttttccctctaaggaaaatccctatatcctggag

SEQ ID NO: 1987 - DNA, 159 bp, Homo sapiens
ggaggcgtcagcctgcgcggtgctgcgggtggacatcttcgggacgcgccctctcccctccccccacccaccggccgttttctagtctggggctgtgactttaatggtctggacctgcttcagattcgtacgcgagttgctggggctgtgaacttttga

SEQ ID NO: 1988 - DNA, 176 bp, Homo sapiens
gtcgccggaagtgccaccgagaagcgccggcctcggggctgtctacagcggcccgggagaggctgtggtggccccgagcgcgagtgtgtaggtgacaggacagcggccaggcccgcccctcccctcggtgagtacccggaagccgttttggggtcgcagcggggtggcagcttgtt

SEQ ID NO: 1989 - DNA, 175 bp, Homo sapiens
cggcggcggcgagcgcggccgcccccggcaccacgtaaaccgcccccgcccgcccagctgcggcccaggccggagcggagcctgccgtcctccgcctgcctgctgctcgcctccctagacctgcgcgtcgcttcccggcccgccgaggaggtggtggaggaggaggcgccgcttt

SEQ ID NO: 1990 - DNA, 153 bp, Homo sapiens
cgccggcggctcgggctgtctgcggtacagcaggaagaactgggcgaggagcgtgaggaaggaacccagcacggccgacgccaggatcatgagcagcagccccatcccgccaccgcctccgcccgggcccctactcccgcgcccacagcgccg

SEQ ID NO: 1991 - DNA, 145 bp, Homo sapiens
atttatttgtgtacgctatttaaaactctgtgaaccaccggtctaggctatactttgcagtgtattaaggtggtcttcggcacctctcgcagacccccttcctcttgcctctagcgccaacctctcagcctctcgcataccaggg

SEQ ID NO: 1992 - DNA, 225 bp, Homo sapiens
tcccttcctcgcctcgcctccgacacggtggcagcctgcaaaacgtggagcgcggagtcactgccacacctggaatccgaagcgggctccgccggctcccggccgaagccgcccccgcctgccggggaggggagcgcgtgcgtgggcggcgcgtgtgtgtccaaagagggctgcgcgggcgccaattatgattgggactgggggtgccgaaaatcaggggtgggg

SEQ ID NO: 1993 - DNA, 154 bp, Homo sapiens
cagaaaagtcatttccggtgtcgcgctttcttggaagctataaagagccacgttaggtgttggcagagcggccggtatagtcctcatacccgctctctcatgcttccggacacagtgaggctgtggttgccatgttggtgactggcagagcggc

SEQ ID NO: 1994 - DNA, 169 bp, Homo sapiens; identical to SEQ ID NO: 134

SEQ ID NO: 1995 - DNA, 153 bp, Homo sapiens
cgagccctggccagccacctcctacttctcccaaagttgcaggcgcggtggtgactccccctgccccgggctgggagcgtggcccagcccttccgtgcccggcctcagtcttcccgccccgggtctgcagagtgggcccgccctggccaggcg

SEQ ID NO: 1996 - DNA, 156 bp, Homo sapiens
tgcctatcacctgccgtcctctctctagtaaccttagtaacgcctcctcggaggatcctctcagagcagctcatcagcgcttcagatcagcctctccctccttcccccagtaaaacagttctcataattagaacaaaaatatctctccatcgtttc

SEQ ID NO: 1997 - DNA, 312 bp, Homo sapiens
gcacactcctgtgggttgttaggtcccccgcgctgagttgtgtaactaccaataggaaacaggaacttgggccaaagccagcttggagtccaagcagctgccactgccaatgggtacaagagtgtacacgtgtacatgcatgggcaaggtaccagccacctgtcttaggctggctgctagacggagggccaagtgtgtgagggggtattgtgcagatttggtgagttgagggagtgcaggatatgcatgtggttgcagcaggaatgggcatctccgttgatctggatatgggagtttcatggcccaggggct

SEQ ID NO: 1998 - DNA, 91 bp, Homo sapiens
cctccgcaataggggacttggagaccccctcaatatggagtagggcctccaagaaggggcgctcagggaaagaaaaccccggaaatcctct

SEQ ID NO: 1999 - DNA, 135 bp, Homo sapiens
catgagacatccgctggcgcctccgcccgccaagcctggttcggggggcgggggagggcacagagagggtcagagagccgcattccgggcccggggatgtcctacatatctatgaggtagggactaggaaaacct

SEQ ID NO: 2000 - DNA, 321 bp, Homo sapiens; identical to SEQ ID NO: 152

SEQ ID NO: 2001 - DNA, 393 bp, Homo sapiens
cccagggaaactccaggccactaccggtgggtttgctcagctgtgggtgacgtgactgttctgtggtcatgaaccaggggccctgcctggtgaagagtagcgggtggggattcccaggaaagagaaactgaactcctttccatatggtggctgcggtgcactaaagataccagtgtagtgactgggacctttgttccttccccagcctgaggtctgttagggcagtaccactgcaactgcagaggcgaaggtttgtgggttcactctggtatttatttcctcttcgaagaaatgcgggggtgcctctgattgaagtggtcaggcggaaacaggatggtggtgctggagtctcaggtcgggcagccctatgcagtgaggactgggacttgtggg

SEQ ID NO: 2002 - DNA, 170 bp, Homo sapiens
ctcccccgggcccggccaacgcacacactaacttgctcccccgtggcgccggtggcgaatgctccaataggcggagagctggtcagcgctcacagcctattggctcggaggagctgccgctccgcgcctgggtcccgcccccctgcccctgtcgcgtagttgggttgcag

SEQ ID NO: 2003 - DNA, 125 bp, Homo sapiens
gccccagcatgctggggaggcggggctcagtgacggacagggagctctgcgaattggcgcccggcaaggggtgctcaacggcgcgtgcgcagagggaggcaggcgggtgggctgccggcggtgga

SEQ ID NO: 2004 - DNA, 150 bp, Homo sapiens
gcttagtgagcattgtggtttaaagacgcatatgaaggaatttccatagtaaacagggagtggagccctgtaccgtctgggggacgatgtgtcagctctcagggtccatggttgggtttttgtttcattttctaatgtgtcaaagtccaa

SEQ ID NO: 2005 - DNA, 173 bp, Homo sapiens
cgctcaaactggcgcgttaggaagtgtattcaaatcgcgcgctctggcaggggctttcgggggctcacgctgaaggatcgcggggcactcgtgagacctgccgcctggtctgtgcgtcaggccgccctggcttctagtaattgggagagtacaaagcatcccttgttgaccct

SEQ ID NO: 2006 - DNA, 307 bp, Homo sapiens
cggaacagagccggttggttgctcagtgcgcgtcacttccgggactcagggtcgcagggaactacttccgggggagcggcgcggcggcgcgggaggtgagtgccgcagctttgcggtggggtgggaaccgagagagagccgtcctcggtgcggtggcctggctttcccggccggcctgtctccagcggcgccgcttggtgggcccggctgtcgctccgctcagggcctgaatacgttccctcggcggttgttcgaaagttacttccggaggggaatttgagccccccgggaggcggagggcctcgcc

SEQ ID NO: 2007 - DNA, 85 bp, Homo sapiens
gcttctttttttattaattccgaagtcgaaattcagcactggcaaacagattggcaaaacctaagtcatatgcttgtaccctagc

SEQ ID NO: 2008 - DNA, 138 bp, Homo sapiens
gccagggttagggcgcgggggctttgacccgggcgttcacatggcgagggcttggcgtgggcatgaacgggtggctcctttgctggcggggaccgtgacccgttgggacgtgggcccgcgaggaatcgagggtagaaa

SEQ ID NO: 2009 - DNA, 152 bp, Homo sapiens
gcggcaggcacttttgaggacaggaaggggagaggtgacctgagcatccacgcagctgtggcattcggggacgggccgaggactgggtttcttgccatcctcagcgctgggggtgactccaagcccccgggtgggggtggggagtggccggg

SEQ ID NO: 2010 - DNA, 140 bp, Homo sapiens
acccccgcttctgaatgccacaggaccgaagctgcacaaagtttgcaggattgtgtgcataattacctctgccgacgaatctattcccacagaaagcttcgctggagagattacaatgctttgagccttaccgcatttca

SEQ ID NO: 2011 - DNA, 146 bp, Homo sapiens
ataaaatcccaagattctcactctctgttaaaggaaggatttcggcgtgttgtatagcaaaatcctttcagcagaaaaatgcaaatctgtggtgctaatcaaggagaggcggctggagcactcccaaatgctcctccatacctggg

SEQ ID NO: 2012 - DNA, 144 bp, Homo sapiens; identical to SEQ ID NO: 18

SEQ ID NO: 2013 - DNA, 148 bp, Homo sapiens
aaaacgagaacacctaaaaggatgtcatcacacccaagtttcctctgtggccgaatctctaaccttccagagctgatgtaatgacatcctgttaagactctcgttagcgtgctcactgatgtatttgatgccaccagggctgagctac

SEQ ID NO: 2014 - DNA, 145 bp, Homo sapiens
actgtgccataggtatgaaatgcacgctttgttcgaggttgtacggggcactgaccggaactttacactccaggatcgtttcgaaaaatgcttattcaatccacagtttaagttatgcaataattcgcttaaaagtatgtgttca

SEQ ID NO: 2015 - DNA, 336 bp, Homo sapiens
agactgtggtgctgaggaaacactactgaattataccacacagaccggagcgatgctggtccaaagggcaaccggacggcttaaaagcggggcgggggaacgcttagagcccgtagagggacacggaggcgctgggtgaagagtcagggatacgcaggcttcgaaaccccctcggccgctccacccagggggaaagtccagcgaaaggcggcagcagatcttagggagcaactcccggcgtcagagaggcggtactggcagccggttatggaagaatccggaaccaaggcactgggcgcggtgaggccgtgggcgcagagtccgagaatcaacagc

SEQ ID NO: 2016 - DNA, 176 bp, Homo sapiens
cctccgccacctggggcgcctcagccaatcgggagcagccatgctgcgcagtgcagaacgccatagcgacggatgacgcctgccggggaatcgccgtagcaaccagagacgcgctagatccaccaccaagcttgcaagcagaagaggcagcaagtgatgctgaaggctgtgctgca

SEQ ID NO: 2017 - DNA, 201 bp, Homo sapiens
ccctgtgctttgtacctagcccggttttggcctgctcagtaagtagaagcacctgggcagtggctgggcacacaggaagcacaagatgagtatcagtttctgttgccactctgacaagtgagggaagaccacaggaaagaaaggagcttcacaaaagaggtcagagagcacggcgtaggaagcttatctttccaacctagg

SEQ ID NO: 2018 - DNA, 113 bp, Homo sapiens
aggatccggtttgctctgggcgggtctggaagcagagccggcggagggagcgccggggccctgggctgcaggaggttgcggcggccgcggcagcatggtggtgccggagaagg

SEQ ID NO: 2019 - DNA, 311 bp, Homo sapiens
cgttaaagcagcctaggacttaggtcaattgcggtggtcacttgaccgcctgtgaggaggcggcgcgtggggtggatcggactgggcgtggcgggggctcaggaaggagggtggccctaccccagcgggctcggctcggggcctccgcggcagttcggggtccttcacccgccggctccaggtaggctactcctcaggtaagccccgccgccagccgcgacgtcgtcgcagacaggcaccgcccccactcgtgcggcgcgagtagtcctgcccctccgcgttgtctccggccggcacggcccggcggggta

SEQ ID NO: 2020 - DNA, 385 bp, Homo sapiens
gctttcctgggggcctccacgctgcagaggggtggcctcagcccacattgtcagccttccagcctgctcctccacaagccaagctgggccgccacagctgtgccaggctccaagggctcacaaactaaactcgggagcacacgtctggtttatggtggcaggcgctgccccgggagagggcgcataggctggggacgatgacggcaggaagcaacaaacagctctttatcagctgtggggtgggggcatgaaagggggagcaggaagggatggggaagctgctatggaggagcccacaggagaggcgtttgtgtgctttaaaaataatcatcgaccctcatggggaggaaagactcgtctgtgagggctgctctgtttttacagt

SEQ ID NO: 2021 - DNA, 437 bp, Homo sapiens
gcgtgtgggcaccgccgctgctcgctgggcgctgaggagggtgggcgcggtggcgggctgagggcggcggcggcgagcgcagaaggctgaggcgctcgtccatgcggcggggaagaggcggcagcggtgaggccaggtcgctcctcctcgcgctccccgccctttcgccgcctccgcccccgagccgagcccaccgcctgttgcagccaaagccgcgatgctctgtctgggtctggcgcggtcagccgggctcccgcacggggacgcctcctccctccttctcgcgctctccgccccctcccctgcggggcgcgcgcccgcctccgcgtccccttaggattcccgcccaccgcgcgggcgcgcgtcccgctctcgggggcagccgccgggcctgcatttcttgcagccctcaaggcccctcggtgtcagcgaaagag

SEQ ID NO: 2022 - DNA, 390 bp, Homo sapiens
gtctaactttgatccacagaaaaggctgccgggtttctccacaggcgtcctgagtaccaagtcagaaagcaagtttctgggccggctgccctgggccctcccttccttcctctcctcctcgagaccctgcttcacgcctctcttcttcccctttatttacatatacagcttagtgtaattttgagtcagttcatttgttttccctgtggttaccaaccagccacccctaaacggttcctcggtggctggaagtcacagtgtggatcttctgttactgttaagctgttttcgcgtccttcttgcaccacatttgatgaagtgagttgaaggtacttgtttccgttacaagagtcacgccctccctgtcagatcctgaatccgagatttatt

SEQ ID NO: 2023 - DNA, 243 bp, Homo sapiens
gtgcctggctggctggctgcgaggcccaagccaggccatgtccccactggaccacggatcacagcctggaaaagccccattggccgcaggttcattagagagatttgtgctgacccaggctccgtgattttaagaagccaaatctttgagtggagtgagagtcctagattgtctttaaaagcctccagacctcgcacagcccatgcgctggctgctaccggggatgtactggctttactatca

SEQ ID NO: 2024 - DNA, 147 bp, Homo sapiens
gcaacagagccttacttcaaggcccccagcgggctggctggaaccctgcttcagctcctccaagcacgtgcggccaagttctgggagccacgtcgatgtgggttgatgggtcccctgagacgccctctctgctcagaacacagccag

SEQ ID NO: 2025 - DNA, 323 bp, Homo sapiens
gcaggaagtagaggaaggtcccctttgccggccggcactggctcctgagacaggagatcggcttctctttcagcaggggcccagggagggaggaggccttagggtgtgtgtgaacagggtccacagaacaagggagcaggaagctaagggcagggcacgttcacgtgaacagctttgggcggccaagaaagccacgaggagctgataggaaaatgggtggaaactgcaggtgtctgggtggttggagcctgtgggttaggtcagagggcagagggcagcagagcccaggctcgaggactctgcagcagcccatctgctcccac

SEQ ID NO: 2026 - DNA, 180 bp, Homo sapiens
gggaaccaccacgcctcaagtccgctgtatggccagaaccttgccaggacctcggtcactgcagttccagcaggcgggcgaccagtgtcaccgtcgtccggccaagccctcgagccagagctccatcgccttcgcctgccgtcgcatcggccccacggagacggccctatgcttcatgtg

SEQ ID NO: 2027 - DNA, 419 bp, Homo sapiens
ttcagcaaatcttcaggcaacgccgaaggtggtgagaagcaggaggcagagcgagaaggcaggaatggaggggccccctagaggcaccagcttaagaggaaggttcacgagctcaggaggacttgggggagtgctgcaagatggtgcgagaaatggagaaggaagacagaacggggtaagagagagaagaggagagaaagaacgcaggagaggagggagaggagaaaacggaaaggagtcagagactgggaggatgtccaagctgccgggacctcagagaacccgtgtcgttagctaccgtgcctgaagggggacaacaaacacggaggacggaggtgaaggcacgacaggagggagacaagcaaaagccacagagacctggctgacgggggggaggggaggtcgagcagcgctaggtt

SEQ ID NO: 2028 - DNA, 141 bp, Homo sapiens
gggagtcctgggcagggccgggctggggaagacgcctggggcactgcccggcgttaacaaagggagccgataccgaccggcgtgggcgcggagcgggcggccgccaccgagcgtgctgagcaaccgcagcctccgcggccg

SEQ ID NO: 2029 - DNA, 391 bp, Homo sapiens
agaggttgcagttcaaaaggtggcacgtgttcctcttttggctagcactataactagatgaatgatgaaataacagaggatagtgaggtacaactgttaaagaggattaatgagtcatcgtggtatgcaatccaggttgatgagcctgtcaatgttgacgataaggcaagaatgcttgtttttatgtgatatatttttcaggaggatgtgcatgaggatacgatatgcgtacttttgttgccaaccaacaccacagctgcagaactattaaagtctttgaatgattacctaacaggaaaaccacattggtcattttgtgttggtatgtgcacagacgaagcagctgccatgactgaacggcttgctggtttcactactcaagtcaaagagg

SEQ ID NO: 2030 - DNA, 173 bp, Homo sapiens
ggtagaaccagcttcggcgttgggaacgcaggcgcgcttacgcatttagtgagggtttggcggtctccatagttaccgccgccgcgcgtgacgtcatagtggagcgctgagggcttggtggcgtggggtgggggctgtcctactgatcctgaatttggggtcactggtaagag

SEQ ID NO: 2031 - DNA, 169 bp, Homo sapiens
agtgactggggcttgtgtcaagcttcttctgaatggctagacagccgccaggtgggagaggcggagggtgaagaggcgggttccgcacgcggttagcctggggctgatctagtcttcagctttcaccggctgggagtccggagctgcagcagaggccacacccagggct

SEQ ID NO: 2032 - DNA, 144 bp, Homo sapiens
gtcgcgcttggaaaggaggcagcaccgtggcacgaagacgtctcagccaacgccggctgacccccggaagtcccgccccgaattccggcccgccgctcgttctatctggggcagcgtagcctctctagatggcgggaggccggg

SEQ ID NO: 2033 - DNA, 569 bp, Homo sapiens
aaagcaagtctttctttggcagccctccggcccttaccttgtctggagacgcgccccccaccccgcgctccctgaactgctgtgcgtcgagctgagtcctcgccaacggccgcacggtgacgttgccgtgtgagcccagcagtcgcgggcaacaggggatttttcaagggggaaatgacgattagaagagagaatcatctaaatatcaaagtgacacatggggagacttggaaaaaatatttaagctaatgaaaagcaaataaagaagcagacacttaggctgggaaattaaatattatgtttaaaatggtgcttttgtccgggcttgaagatttccgattcatgtacacataataaacactcaggtttgtcatctggaggtgcaaatctgaaagatattccgacaaatgaagtgctggcagagagaggaataaagagatcggtgcctgtcaggggtcaggcagcctgagattgcttctagagatcttttgaaaatttcacacgattgaaggcttaggggcttcactgcgttcgcatttcaaactcagatcagtgggatcacaatcaaa

SEQ ID NO: 2034 - DNA, 184 bp, Homo sapiens
gccaaagacacagttgggcagggtacaggcgtggagcactgcggtggcagagtcagtctgagaggagttagcacatgacatcagtgcacagtgcagatgacggaaacatttggcagcatcctctccagtgtggaggtgatgaccgaggtcagcataatccagctgttcagatacagacttttcc

SEQ ID NO: 2035 - DNA, 149 bp, Homo sapiens
tcctcctcctccggctcctcctgctcctcctgctgttggtgctgctgccgcggcggctgctgctgtgatcgcctgggtttgttttctgcacttttatttcacgaggtcctttaaaaagagaagacgtggggggagagagagagagggac

SEQ ID NO: 2036 - DNA, 146 bp, Homo sapiens
ggaaagacaaggcgggaaatgggtgggggagcagccaaggggaggggcaggctgtggagctgctttgccggtggtcgcgcgggtgaacggcagttttgtcagctccttcaaggaccaggtcctgcgcatcagtactagggccatcc

SEQ ID NO: 2037 - DNA, 143 bp, Homo sapiens
ctgcgctgccgccgctgcggggaagccggctattccggggcttggtgcggtcttggagccggagggtggcccgtgtgagcgcgagcgccccggaccttcgcggtgcgcgtggactgtgcgcttcctcgtctttggtcggggtg

SEQ ID NO: 2038 - DNA, 244 bp, Homo sapiens
aagcggagtcgcctaggaccaggcatagtggaaatgatcccggagagaacatcttgaatgaagccaggaagtcagcgggccagaggttgtacaggggctctgcggttggcgtggctgaggttgaggccacaagttactggggaagttaattgttgacaggagcttcgtactcggctcacagccacgcacagtgggcttcctcccagtacccgcccttgcccctgggcctaaccctgccctggag

SEQ ID NO: 2039 - DNA, 147 bp, Homo sapiens
atcctgggacaatgataacagctacctttcactgggccctcacttcgtgccaggcactgtgtaaagggactttacgtttaatcttcacagtaacccctttgagtgaggtactgtcattaccccatcttactgatgaggaagctgacg

SEQ ID NO: 2040 - DNA, 115 bp, Homo sapiens
cccatttcaagcttgcttgcaggggcgagtgatgggctcgctccattgtgctcgtatttgcatggatgtgatcgcggccttgattggccggcgctgagaccgccccgccccctgc

SEQ ID NO: 2041 - DNA, 129 bp, Homo sapiens
ttgggactggcttaacaagcccacaatattctagaagcatgtgcccgtcccaggagccgactcagccatttctcaaacatgaagaggactgggccgtgcagtcctgtttcctcttcctgatctttgtag

SEQ ID NO: 2042 - DNA, 175 bp, Homo sapiens
ggggcaagccaatgggcaggcagtgggcgtagaaaagcagctccactgagacagccatgcagggagccctgtgcaggcagacagctgtggtcaggggttaaagaggtggagaaaagcagaacatggagccatgtagagagcaggtgctggcggccagctggtactgtaacaggaa

SEQ ID NO: 2043 - DNA, 169 bp, Homo sapiens
ggggacagggcggggaacagagtcagggagacaaacaggatgctgggaggtgagaaataagggtggggagtagtgggcaatctcaagaggaactaacaaggccgttgcttatagttacccagaaaacctacgaacaataacagacaagcagatgcagctcagaaagaaa

SEQ ID NO: 2044 - DNA, 148 bp, Homo sapiens
ttctgcttgcggttgtttttctttttcctgttctcaggcgcgctgcgggcacctctcggacaaggccccagccgtcgcgggttgccgggcagagtcggacgccgccagctcttcactccacgcccacctctctcctggagcgctgggc

SEQ ID NO: 2045 - DNA, 145 bp, Homo sapiens
gagcgcagccgcggcgcgggcgtgggcgggcagaggtgatagcgagcgccggcggctccaggtgcgggggcgcccctcgcgctccacctgcgccgccgccgccggctctcagggcaagtttatctccccccttctgcggaaaccc

SEQ ID NO: 2046 - DNA, 146 bp, Homo sapiens; identical to SEQ ID NO: 215

SEQ ID NO: 2047 - DNA, 179 bp, Homo sapiens
ccaccaacaggaatctttggggtctaaaccgcaaacaggcgaaattcccgccaccgcgcgcccgcgctccggaaaggcggggccacggcgcagccctcccccggctaccaatcgcctcgcgatatctgcgcggaaacagtcggagccccacgaattctcgcgagagtccgtcagtccgg

SEQ ID NO: 2048 - DNA, 137 bp, Homo sapiens
ggaactggccccggggccggccccgagggtggagctgccgggagcagacagggcgctccgcagcccacctgagcgcgccgggcccgtctcggccccccggccgtggctggtacttttccgcgtggggccagggcgag

SEQ ID NO: 2049 - DNA, 145 bp, Homo sapiens
gccccagccctggccgccgcgctagcgctgcatggcgcacgggggctggccgggggcccggggaagcgtgtctagttggcggcggcacctccggctctcgcggctcgctagtggctcccccgcctttccccgccccgcgtccgtg

SEQ ID NO: 2050 - DNA, 135 bp, Homo sapiens
ctttcaggaagtgaccacacaccatcaagaggatcagctgctcaggaaggcaggaccagataaggtataggcgagcccgggagcaggcttcaaccacagtggcaggaggaagtggatttggtgcactgcagaaag

SEQ ID NO: 2051 - DNA, 148 bp, Homo sapiens
gggcctgaccgacccgtgggagcgaggccaaaccctggcccgcatgagggcgaacgcctgggattacgtcatcggcgcgtgacgccagaggctggggaatcacccgcttgctgcgtgacgtcatcgcgtcgcgtcactgttctcggtc

SEQ ID NO: 2052 - DNA, 174 bp, Homo sapiens
acccggcgccttgcggacttgagggaatgaaatggaaacgcttccggggaaggtcgcgggtgtgggcgcctaggtcggcgcagccttgggagccgccgtgggtcgcggactggcgtggccagtgtggaaacttgggactgtttgcgatttctgggcgtgggaccgagttccaag

SEQ ID NO: 2053 - DNA, 238 bp, Homo sapiens
cgctccggaggtgatggagcctggtgggcaaaggggagcaaaatgcggcacgcgctcttttccgtcctttctttccatcggtaaaatctagactaaacaagaaagcaatccttgtaaaaatagtatgttacatctttgaaaatagtggcaccagccggcgtaacatagggagacccagtctcaaaaataaacaagcaaataaataaaataatacgccgagcttggttgtgcgcgcctg

SEQ ID NO: 2054 - DNA, 235 bp, Homo sapiens
gagctttctcttgagcggttctcccagcttcagtggaaatgagaaatgtgaggaaaggtcacaggcaggaggccccagtagcaggaagcaaggtttgagaccaaagattgaaagaggaagttgggaggaaacctattactgcagaaagaggctgagcttgtagccaaagagaaaaggaaataaaaatctagaacactgaatcggtctctgggtttgccactcccaacctgtgtga

SEQ ID NO: 2055 - DNA, 162 bp, Homo sapiens
agggcagagaccaggcagccgccccgactggcctccttaggcccccctctaaaaaaaaaaaaaatcgagccacacccacgattttttggattcaatatttagtccttgtagatcaaactactgaggtatatcttcatctgcaagtcagccttttgttttatg

SEQ ID NO: 2056 - DNA, 170 bp, Homo sapiens
tgcggacgggtgccagtgcgcaggtgccggggcccagcgcaggcgcacgggcgtcaggatgcggcctgttcctcccggcgtgctccgcggctcttggctcacagccgtcccttcgctggtgggaagaagccgagatggcggcagccagcgctggggcaacccggctgctc

SEQ ID NO: 2057 - DNA, 151 bp, Homo sapiens
ctagttcaccaggactctccgttcgcatctcaagagtgtccgtggggtatctctccggaaagagggaaaggaggcggcgacgatctgggacgccaccattcccgccacggccatttaggacccaggtcccggcgcgcggtccccgactagc

SEQ ID NO: 2058 - DNA, 326 bp, Homo sapiens
aagtcttggtttgtctgactcagcgtttccgctgtaaatcacatctaataataccgagagtgagagctgagacggaggtgctgtgggtgaaggggcaccggggaggaggggcacgccgcctaggtgccaatgggtgttgttcagggagggagctctgaggcggcaggaatgggggctgggccctgaggaagaaggtgggagcagcctgccacccctgcccccattcctgctctggagcttgtgtaggtcatgagctcagccaggctggcccagccccccagtgctttgagtgccgccaggacaagatgagatttgtcccagcctac

SEQ ID NO: 2059 - DNA, 157 bp, Homo sapiens
ctattcgtgcagataccgataccaaccccatccaccccttcgcgcaactatacccctaactccgacccagcccaactcgcccccctcaggccagcaacgccgtaggttgtagtgggatttaactccttctgcagcgcatgcgccgaaaccacagata

SEQ ID NO: 2060 - DNA, 261 bp, Homo sapiens
agtaaagggaagtgataacccccagagcccggaagcctctggaggctgagacctcgccccccttgcgtgatagggcctacggagccacatgaccaaggcactgtcgcctccgcacgtgtgagagtgcagggccccaagatggctgccaggcctcgaggcctgactcttctatgtcacttccgtaccggcgagaaaggcgggccctccagccaatgaggctgcggggcgggccttcaccttgataggcactcgagttatcca

SEQ ID NO: 2061 - DNA, 154 bp, Homo sapiens
gcagcggcttggaagagagagggaaaggaggaacatctacccggctaagagacgccgccagagtccctaaagctggcgggggacggaggccggggtcccggatcttcagagcgcccgcagccgggcttctgggctcctcggtgcggggaacctg

SEQ ID NO: 2062 - DNA, 141 bp, Homo sapiens
agggcgcggagcacgccgggaagctcgcgggtcggcaccgggacagctcccgggcgccgtggaatgcacacgtcccgcacccggaccttccggtcagcttcccggctcgctgtctgatgcccgcggtagccaatgagctag

SEQ ID NO: 2063 - DNA, 147 bp, Homo sapiens
aggtgtggagttgcggcgaagggagccacttctgcaaggaaacagtagattcataatgtagaatgaccgtggcaacgtcgttcaaagcacattctttcgaataacaaggctttcgacatgccccacccccgcgcacaacacaccaca

SEQ ID NO: 2064 - DNA, 407 bp, Homo sapiens
gctggaggaaagaggacctatctgaggaccgactggccgaagcctgcaagtttccacaaatgcagtcgctgccgcggcgtctgtctacacacacactggaaggcaagagtaacggagggaggagactggggagcagggaaggcgtgggagcgggacagaggggcagcccggagagcgctggccaatcggagcgcgctccgccagcggccaatcacgggccgcctagcccggcaaatctgcccggcagtgcggggaggggctgctgggagtcctggtgccgccggctgcacttctgtgtgtctttcaggaagccacagggcagggggcgtctgtgcagagaagcgggggagtgagtagcaggcaggcccagcttgtgtaccagcccagtgacatatatagaaacataa

SEQ ID NO: 2065 - DNA, 92 bp, Homo sapiens
gggccggggaggaggcgcttgcaagtctgtaccgcaatgcctctactggcctctagagggcgcaatcactcgaggctccgccccaagcgagg

SEQ ID NO: 2066 - DNA, 164 bp, Homo sapiens
aaagtatttgaggaaggggaaagaggccaagaagaaaaaggggtgtatggggaatcgaaagcactccagcaataaggcaaaagggggccggcaatgcaggccgacactgaagctgaactttgaagacatcacagttttgctaaggttggaactatcactgcatc

SEQ ID NO: 2067 - DNA, 129 bp, Homo sapiens
ccagtggagacctaaggccgacagacacgtctacgagcctgtgggacccttggagtcacccaggccaaacattccaatttatagagcaggaatttgaggcttcctttcctacagccccgtccacactga

SEQ ID NO: 2068 - DNA, 141 bp, Homo sapiens
aggggaagcaccgtccccagggacacctgttgtcgcctccccactcgggccgatgaagacatcctgggcgtcccaatctcgaagacacccgtcggccagaagtgtctgtgtatggggccaggtgtcgcaggagtcctcctc

SEQ ID NO: 2069 - DNA, 143 bp, Homo sapiens
cgagcgcgtgatcgaagcccgcagttttttcgcccccgtcacttccgggtgcgacaatctcttctgtccggccagccgctggagtcgttaggtgccgccttgcttctgacgagccacacgtttgcttcttccctgtgttccca

SEQ ID NO: 2070 - DNA, 135 bp, Homo sapiens; identical to SEQ ID NO: 303

SEQ ID NO: 2071 - DNA, 621 bp, Homo sapiens
cgtctgcgcgcgccagcaatcaaaacattccggctgcgcgcccccgccccgccggcggcgccccttcctccgttacccgccgcgagctcacttagggctccgcaggcacccctgggcaaggccagacacggggcctgggattccaataaccggtctcacgtcttacctcaggaacagcgacccgggtgattccagaggctccgccggctccgctcggctcggctcggctcggcgcgacccgcggcgctaggccgggtgtctgccactcactgtcacccgcagccaggctggccaataagcacggggggcggagacacaacggccaattctcggcttcagggacgggactaaagtctcgaggcgggtcttggacagtcagcggcccaatagtgtgctctacgtggggcggggctcaggtgcggacgccgccggttgtcctcttcgctgctccgtagtgacggggattgttgtgttgcagaaatccggcaatcgacctgaggacttgcgagccgctcagctcccgggacgtttggtgcgtcttctaagggcgtgggcgagtttacgcgggccagttgttgctggtcgcatgggtaacgaagaaagttcggctaggcaagctca

SEQ ID NO: 2072 - DNA, 139 bp, Homo sapiens
taagccatgggataaagttatgagactgttgggggaagacgcccccggattcctaagagactccacgccccacaggggcgctagtctgtggcggcagaaaccctggggaagctgccacagaatcctgaggcccctcaca

SEQ ID NO: 2073 - DNA, 225 bp, Homo sapiens
aacttctgagccatgtcaccaacttaaccacccccaggtacctgcaacggctcgcgcccgccggtgtctaacaggatccggacctagctcatattgctgccgcaaaacgcaaggctagcttccgccagtactgccgcaacaccttcttatttcacgacgtatggtcgtaaagcaataaagatccaggctcgggaaaatgacggagaggtggaactatagagaata

SEQ ID NO: 2074 - DNA, 282 bp, Homo sapiens
cagcgattcgacatccgaatccaccgccgccatagcgactctcctgtaccgacaaaaacacaagcacctctgccaccaccggaacccacttcgccaaagctcaacgcgctcggaagcaacttccgccgatccgataggaagtgacataaagtcgttcaattgcgcggacacactcctccggaaaccaagctccttcgactctgggttccgtttctagccgctgtccagtccccgcccgtttcaggaaaagcggcgcgttacgatgcttatctgcatgcggta

SEQ ID NO: 2075 - DNA, 149 bp, Homo sapiens
ggaaaactttgtacagctgcaggctttcaccatacacaacagcatcgctaacgaatgctattacaatattcatttagcgtttaccaagtgcctactctatacaaatcttgagaatacaacgtgaaggtgaactgctgactaaagtttgg

SEQ ID NO: 2076 - DNA, 145 bp, Homo sapiens
tccaaaccaagaaggaaaggctggggttttcaagagggcgatttgtggtttgggtttggtctgtctgaaaagagctgtggctcacagtcttaacgaggttcgtcttccaagtctctgaccaactgagcagaggttctcacagaag

SEQ ID NO: 2077 - DNA, 319 bp, Homo sapiens
atgtttaacttaaaagcctaaagaaatctcagataattcacttcggagtagaaacctccttcagccgcgctcactacggcgcccggcttcgcggcaccggccactagagggcagtggccgccgcaaagccgacgcgggcggtgggctcggcggctcggccatcgcttgctctcgcctggcaaggggctctcggccgtggattagcgcagctggagacgtgggaggccgcgggccccgcccccgaccggcggcggctgcggcggcccagcgcggcagtcggcgctgcgaagtggaggcgctgcgagcggagccgcgcgga

SEQ ID NO: 2078 - DNA, 140 bp, Homo sapiens
aggtaacaatgtagcaaacttaaacatacaaaggctaaaaattcttaacaagccaaatgacagcaccaagaatctcgaacgctgcaaaaacaaaacaaaacccccctgaaattggtagcatgtgcaccagcccctgttaa

SEQ ID NO: 2079 - DNA, 153 bp, Homo sapiens
cagcggcgggaggcttcccaggggcggagcgagaggttggcccggtaggatcgggggactgagccgagagtcaccgcggttcctgccccgggagcccgggctggccacacccaggtgagtggcactgtggggcgcggcgcagctaggctggcc

SEQ ID NO: 2080 - DNA, 140 bp, Homo sapiens
cggccaaacggaccgaggaccgaggtgcgcagggggcgctcaggtcccagaccccaaagacgctgcggcgaggcccgggtcccgccacagccggttccgactggttccgaccagcccttcgccctgcctcaggacgccgg

SEQ ID NO: 2081 - DNA, 262 bp, Homo sapiens
ccccggagcctggccccgcatctccgcggccgccgcctcctcccaccactgggggaccggcgccgccgccgccaagtgctgcaatggctgccgggcctggccccaccactcctctcagctccgtcgccgccatgagccgccgccgcctggagatacaagaccggaaccgcctacgagagccgccgtcgccgcccggagcgccccacacggctaccgcatcagccaccgccgcgcagcgtccccgccccgcccggccagccgc

SEQ ID NO: 2082 - DNA, 161 bp, Homo sapiens
cgaagcaacagagaggaggggcgggggcgcgcggggacccggcacggagcgcaggggcaccagggaggacaggggcgcaccccgagttacctgtgtcggcccccgagccggcgtgcaacagtctgacctccggccgctgcctgtcgccacccggcctgcgc

SEQ ID NO: 2083 - DNA, 239 bp, Homo sapiens
cagctaataaggtactcaagggccgcgtgactgttctacactagaattacttggtgcaaatgttcagacagacataggggagcgtgctggaggaaatcgctgcagtgaggaataaatatcatgatttttgactttcccctccagtcagccagaaggcggcagttggggaccgacagtaaagctcacagcaactccaccccggcagcctcagagttgcagatgtcagtgcaacatggttt

SEQ ID NO: 2084 - DNA, 95 bp, Homo sapiens
gggggggggggtggtcctcagagccccagcggggtcggagacacacagaccaccctccccgttcccagaagtcgcggtccctgcgccacccggag

SEQ ID NO: 2085 - DNA, 155 bp, Homo sapiens
tgtcttcgagggtcgtgggagggaagggagctggtttgcggaggacccagtcagcgaagcgccgggattccttccttcgccgcgagcctttcgctgccctttcctctgcgcggaggccggcgctgcggcgcggtcccctcgcctccgggggcggg

SEQ ID NO: 2086 - DNA, 149 bp, Homo sapiens
tgctggcgagaatacaaagcacctagaactctaatccacagttggccggagtgtagacccattcactcatgttgggaaacggtttggcaggatctactaacactactagctggatcttctctgactcagcaattccattgctaggtaga

SEQ ID NO: 2087 - DNA, 138 bp, Homo sapiens
tggcggtgcgcaggcgcaggtagtcccctttcggagctctccggttcggtagtctgaggacttggccgaaatgttccgcccttcttttcggggggaccgggcagttccgttctcggttttggggtaggcggcttgagc

SEQ ID NO: 2088 - DNA, 305 bp, Homo sapiens
tcagtcgtttaggcacccctccgctcgagtcacttccgaagcagtcgattcttggggagaagcgctgcggaaaggggcgactccgatgcagatggccctgtcccggcgccccaggtcgtcgcgcgcgcagctgcggtagtcactgcgcctccccgcccccactcctggatgccccccttccctctcccggccagactctgagcaggagctccgcccccagcgcgccgccccagccccggcgccttaaaagccgggcgcaccgccccgccgcgccctgcctgccgcacctctcctttcttctgtag

SEQ ID NO: 2089 - DNA, 143 bp, Homo sapiens
cccaccgcccacttcaaggcgcggcctgggtctccgcccctccccagaacgcggagacgccgggcctggaggagcgcgcgctacggccccagcagcgccctcacgtcccaggccttcccggcccttcttcctgcgccggaagg

SEQ ID NO: 2090 - DNA, 139 bp, Homo sapiens
ctccattacctgcttctcaaaagcactgggtaccagccttctcagctcagacaaactgttattgatccggtctcgtcggcgcttctcaattatctgcagaaggcaagcaaaacaaaggaaggcattaccattacgactg

SEQ ID NO: 2091 - DNA, 141 bp, Homo sapiens
tggccggccacgcttcgctttggaggggtgcaggtgacttgtgtcttagagctgacgcagattgttgcgagatcattgcggagaggcaggcctgcagcgtgacctgctgcgggtccggcccctctcccttttccagagccc

SEQ ID NO: 2092 - DNA, 142 bp, Homo sapiens
ccattcatgaacctgcaccccgagtcaggattctcccctgacgaccctctggtggtccctgcacattctgggagagacgggaggctgcggttgcagagctgcccacggagcgctccaggccagagcagtcactacgcaggga

SEQ ID NO: 2093 - DNA, 133 bp, Homo sapiens
ctcaccaggtcctcccgacgtcctggccccgaacttggcctgctccggggcgcagggagcgagcccggtgcccaggcgcgtcccaagcgctgccgcggccgcctcgcctttcgactcgccagccctttctgcg

SEQ ID NO: 2094 - DNA, 140 bp, Homo sapiens
tccggagcccacaagtgtcagtgattaacactggccttcccctcgctcgcagcaacgccaccacgccctccctccacgcgccatcgcagagatgaggagtggcctcgacctgcctgtgactcgtcttgggccagtagggg

SEQ ID NO: 2095 - DNA, 141 bp, Homo sapiens
ttaaggccaatcccatccctagctggccggcacctgttccaaacaacctgttgcgctgacatcgctttggagaggcgccggcgctttgctggtggaggcgggttgtgtggaggccccaagccttcaggaaatagtttaggg

SEQ ID NO: 2096 - DNA, 141 bp, Homo sapiens
cgagtcggcgcgacggtgaatttccgtttccggcggtgtggaagcggacctgaggagtcgcaattgtgaacaggttcggtgctgcggctggggtaggcggcagtggggtccctggctctggggcactgggaagatcgcgag

SEQ ID NO: 2097 - DNA, 471 bp, Homo sapiens
cgtgagccacggcgcctggcctaaaacctttttttaccacaaaatggagacctgtaaggcgaagtgaggttggatggctggacggtgggggtggggtgcagtcctggatcagggccggagctgtcacttcttcctcttcttgttgtccgggggcgcctcgttcttcttgcccagaatctttagaaggctcttggacatgtagtagggccggtccagggagccgttgttccgctccaggtcttccactgagccgcaacagagaccggttagagcggaccctggggccaggaaatcggggactgggaggcaagctgcctgcgggatttggaatccaagctgcaccaccacccttacccccgggcaggttatgtaatctcagtttcctcctgtgaagtggggtcgggaatattatgttgcatagagcgatgataagaattagcggaaaaaatgcatgtcagtcgcttaggagga

SEQ ID NO: 2098 - DNA, 140 bp, Homo sapiens
tagggcatcatcacctccctccagtctgcgtcatcgcggtccatactccacaccgtattgtacatcgcgctgtcaggggcaggtcgccaggagatatatagaaggcatatattttttatctggtatttaaaaatctaaaa

SEQ ID NO: 2099 - DNA, 191 bp, Homo sapiens
cggctcctggagccctgccgcccgccccctgcgaacccaggccccgccgccaatggctcgccctgcctctgcgccgcttggcccgtcccctctcaagcatatctcggataacgccccttccgcacctttcacgggcggtgggagctgaggctcctgtcgttatctctgatccttgcaccctggcaggaagc

SEQ ID NO: 2100 - DNA, 212 bp, Homo sapiens
gctgctgctgctgctgaggcggcggcggctcggcgctgtttgctccgcgccgcgcggcttgcgctctccccggaacgcccacactctcaatcgctacattgttgacattcggcgctgacgtcacccgctccccattcacaataactttacgggagccgggcagcgcacctccccggccgctggggcgcggtacgcccggcgactagcgtaag

SEQ ID NO: 2101 - DNA, 187 bp, Homo sapiens
agcagtgggagctgctgcagacttttcgtgttggaaaggtcatctggcttttgtctccatggtcatccatggagaatggatgggaggtgctgcaggtaaaccactaagagaccattgcagatgttcagaaaagagatgacaggctagactcgggacgtgggggtggtggctttacagagaagcggaa

SEQ ID NO: 2102 - DNA, 135 bp, Homo sapiens
atgcaaccacaatgacagctttgaagcggccgtggcgatagggcaaccccatccagcctgggcctttaggggagtgtcaaggaagagctctctaaaaagtaacaaatgccgctttcttagaacttacgaaactta

SEQ ID NO: 2103 - DNA, 722 bp, Homo sapiens
agcctctcctgggagggagcgagtggagccttctccccgccggtccgctgggaggttgggagaccaggtggcagcagcctccccaggcgccgggcacccgtcggctggcccagggacttaccacgagcgcgcagcacagcaagttgttcattgtggtccccggaaacctcaggggcttggaggcggcggctgggcgagcgctccggtgcgtctccgcagcccgtgcgctcatcacgttatatatagcgtcccggcaacaggaagtatcgcctgcctttgatcagtcatttttctatcctggaccaaactttgcacctttcttttttaggaagcttgggcgggagcggtcggggggtgtgcagaaagctccagggttaacgctttcagggctggggcggaaaggatcccccagggaggtggggcgtgaggggtggggcggtggtgtctggcccctgggagagcaggggaaaaaaaagccaccgggctgaggaacaaggcggctgctgtctccgcggggctctgaggtttcccggccccttcccgccagcggccagcctcctggcagccgggaccagcggtgggagggctgggcacacgctgggcagctgctgtgcttgtgtctcctccaccctgagagtccgatccagccaagatccggacgcagttggagtgtgtcccagacctttgtcctctcgctgggcgaaagctgtgagtttccgccg

SEQ ID NO: 2104 - DNA, 147 bp, Homo sapiens
atgcgcagtgcgaccccggaacccggctccgcagacggatccgcttttccgtgtgttcgccgacgccgcgggggcgtggcgcggccctagcgcattgtaagcagttgggggtcatttcctcgaggccctactcgctagccagcgccc

SEQ ID NO: 2105 - DNA, 211 bp, Homo sapiens; identical to SEQ ID NO: 163

SEQ ID NO: 2106 - DNA, 143 bp, Homo sapiens
caaagatcattagattcagaatgacttggcaaaccaaaatcttaagagagtgcagtcgcgtggcccagtcactattccacaagtcctcggttgtgagtcacagtcagagtacttcacagaccttagcaagtgatgtaataatc

SEQ ID NO: 2107 - DNA, 131 bp, Homo sapiens
ttcaacatattaaagcgtgtcacactaaggagtgacacacaagacccagactcttccctaggctgggagagactcggcggttgaaagcagggaggcgctacaggagagaaagggctgaacccccgcttccg

SEQ ID NO: 2108 - DNA, 239 bp, Homo sapiens
aagggacactattcccttcacctaccaatcgctgctggcccgggcgccgctggactcctaggtaacgtcgcaggcggaaatgacgtaactcaatccgttctgtcccgccccattgccctcctagccccgccttctaggccccgcctttcctctattcgcgctctgacaaagtgcaggggatatagaccaaccgcttgtgaaggctgctggttctgttagaagcccgctttcgattgtca

SEQ ID NO: 2109 - DNA, 346 bp, Homo sapiens
aaaaaaagaaaaaatcaaccagtcgagggaggcgcgtgaggactggaggcgccagccggacagcctatgagtaggtccctgggtcggtgccgcttcgcgggtcagcacggcctttctcagagaaaacctcctaaacgtgtgaagaccgctttgggggaagcgagagggaggttggaggagccccgggcggggtctcagcgcccaccagctgtgccttcagggcttgggtgttcgctgcaacggcaaccgcgtgagcctcactcccacggccaaggggctagggcagggtggatgcaatcgcgtgcgcctggccccggaaggtgctcgcagggggtgcctgtggcca

SEQ ID NO: 2110 - DNA, 239 bp, Homo sapiens
ttaacgacagaaagcctcgttccgctggtccctgaacaaaaactcctaccctactagtacacagcccacaacaatgcacgctgccggcgctacagcccctaagcaaccggccggaagtcggccccacctcctcctgatgtcacggaaatgaagggcttcgcagaggatgtcccgcccgctcccttcagacgggcgtagctggcaccttcctgagatatgcctgcttgcccccgattttt

SEQ ID NO: 2111 - DNA, 247 bp, Homo sapiens
cccttccgagtgcctacatgtaatcctccctcctctctcctggaccacagcgcccgctctgacagcagggggcgccctcgggccggcggagcctccgcttacccacaatcagggccttggtgcgcagcccgccctggagctctggctgcagcagcagcagctcttcctcatcctcttcgtcgtcgggttgggctgctggagggttgggggcactggggacctcaggctccgggcccagctcctccag

SEQ ID NO: 2112 - DNA, 353 bp, Homo sapiens
atatcaatcacggcgcgggggcaggggggcgcacgggccccgaaggctccagaacccggcaagtgcaggtagccggccgcctggccggccagggctgcttggcagggagcgccgggatctggggggaaagaaatcaagccccgaagctgaaggcttaattaggctgatatcatcccgcacaaatgttcctccgagaggaaggcttctgggcaccaaaattattttgtgattaaaagcgaaaaggaaggagaaatgattcggcctttggaggagttcggagggctgggggtggcagcaggaggctggggcgcagcgcagcgccaggggcgcgggacccagccaagctccccact

SEQ ID NO: 2113 - DNA, 168 bp, Homo sapiens
ccgagacccgcacttagttacctgagaaggcgggaaggtgcggccgcggggtgagcggcggactgacccagctccagcgcctctgcagaggcttgcaatggcgtctctcgggctctgattggtcaggcctccacacgtgagcctctaggagccaatcatgtcggccca

SEQ ID NO: 2114 - DNA, 312 bp, Homo sapiens
ccgtctggggaactgcgcaccatccccatcgctccagacgccgaaacaaaacctgaggctcggagaggggaaaaagagttgttcaggctcgaacatacgcatcccagcctcataggtggatggggttaccgagctgagaaccaagccggaggtccgcgaagccgggccgcccccttgctctgggcctcccttcaagcctgcagtctggggatgggttccgagtcaccgcggtccgggcctcggtcaggcttggtcgggcacacagggcgtttcagaggccagattgacaacctgtggcggcaaaaggactct

SEQ ID NO: 2115 - DNA, 204 bp, Homo sapiens
tccctccctagccctgccaggggcggagacaattgtcagccatcccgcagctacggagtgccagaccgcagagacagtgctggtttgacggcaccctcacccctgcacctgcaggatctgtgggcacccccaccaccccgctgggatccgttccgcagtagggtgcggaaggggaacgtgcagacacccagagaggctgggaga

SEQ ID NO: 2116 - DNA, 105 bp, Homo sapiens
cacgctgagctgtcccctcctcccagagggagacccgcgtggcccccgggcagtgccgaccctgtctgcctgtctcgtagggcagcagcatttcagatgctgact

SEQ ID NO: 2117 - DNA, 146 bp, Homo sapiens
gaggccccagaaccacccgctcaggaccaaagaccctctgctgaggggcggggaggtgacccagcttcctgcaaactcccgacttttgccggagccgtgggcgaagcggccatcaatcgggtcacctttgtaccacccggacttcg

SEQ ID NO: 2118 - DNA, 196 bp, Homo sapiens
tttcccgcgggattcggcaagcgcggccgcggagacccgggggtggaggacgtctttcgccctcagggcagcccggatgacagctaatgcgcctgggcaaggcgttctcaactgcgattcccggccttaaatgtcctctcaacttttaaaagttatttattcaaagtgcatttgctgactaaaccttcactgagcg

SEQ ID NO: 2119 - DNA, 493 bp, Homo sapiens
tgtcctagggaggtggagcccgatccacgaacgttgactgggaaatgctaggtgtcccgagtcggtagtgcaccgacaatttagcagacaaaaaagacaggacgccagagcgcgcaggctgcattagcagagagcgggggtcgggcccgggcccgggagggaactagctgcccggggcgtcgctctcattaacccccaatcagttcacctaataccaggtcgaaatctgagcgcagcgggagggcgtggctgcgcctgccgctaggctccagccggctccgggggcggtaccccacagtcgaggtggtctggagtaaacgaatctgccttcctcccggggtgaaggcgatggtgaccgggttcacacgtgagctgcagtacagcagttctccgtggcctcggctggttcagaaacgagggtgctgggaactctgggccggggcaggacctgcagtcctccggcttcgcgctgtttccactgccggactaggag

SEQ ID NO: 2120 - DNA, 145 bp, Homo sapiens
acatcgtggtggtcggatttcaccacaagaagggctgccaggtgaggaaagggcccgcccccgcccccagccgttcgggcgttcgccccttccggggcccccctgccctgcttctgtgtgctcagctcgcgtcgtgcagtcctcc

SEQ ID NO: 2121 - DNA, 150 bp, Homo sapiens
cggtttcctctcatccagctgctggcaaccaccattctactttctgtttctatgcgtttgactactcttaacagcctcatgtaagtaaaatcacagtatgcgatttgtggctgacaccttacttaatgttctcaaagctcacccatgttg

SEQ ID NO: 2122 - DNA, 133 bp, Homo sapiens
atgaaggaggagtagcttacctctgggggacccccgcggagggggtgcgggcagtcgcggttggactgccgacactgccgcctcagcagcagcgaccgctcccgggttccattggccgcctgcgcttccctga

SEQ ID NO: 2123 - DNA, 179 bp, Homo sapiens
gaagtgtgtcagggactcaaggcaattgcggagagtaaaaataggcaaagaagaaagggcaaaggatttttgttttacttgttccacaaaataaacagggaaagaagtatctctggtctttcagctggagtgagaaaaacagatcgtatctatccctttctgttggctttttatagaca

SEQ ID NO: 2124 - DNA, 141 bp, Homo sapiens
ctcttctcccatctgctaccagagccgggagagctgctcggagacgcctccggggtgcgggctggacatgagcagcggctgccggtcctgggactaggccccgccattttggatccgctgacaggtcagcgaagtctcttc

SEQ ID NO: 2125 - DNA, 238 bp, Homo sapiens; identical to SEQ ID NO: 596

SEQ ID NO: 2126 - DNA, 293 bp, Homo sapiens
tgcttggatatggccgataaattgaaacgtcatcctagttaaaagtaacgtttttaactggctggagaaaggtgacttggggttctaggaagggacagaggaacaaacattctgttggctcagcacgcccagcctgtgttgggctgggcaccttagaggacctgtttcaggactgcgtgactggcgttttgctgggagtagcccaggtgttttaaccacttcctgaagaacaaggttcggtaaaaagaggctggggcgtaggcgtgggttcctgtccctgccatatgctgtct

SEQ ID NO: 2127 - DNA, 308 bp, Homo sapiens
tctgtctcctggacaggtcgggtgcagcacctgagtgggaggcagcccatggctgcactgttgccatttctcttgagtcccctcagctctcttctcttactccacgttttagaaaggctccttgtgtcttacagtggggtggctgaggcactgtgcttagacaggtcacagtctttgtcacagatatatgtgctatgatcataatgatattttttaaagttaaaagatgaattgtttttcatatagcctgactaaggggagtggggagcgggaaagaaggagagggtagagaaggccagaagagagta

SEQ ID NO: 2128 - DNA, 150 bp, Homo sapiens
gcggccgtcaggtgagattttggggggcggggctgccgaagaggccgggaccagggtccccagcttgggcccgtgacggctttttcatgccctagttggggtctccagggcccgcgcgggcattctggaaggttctgcgtcctttagggt

SEQ ID NO: 2129 - DNA, 144 bp, Homo sapiens
ggacacttgcgccgtgtgccaccagaacatccagagccgggcgcccaagctgctgccctgcctgcactctttctgccagcgctgcctgcccgcgccccagcgctacctcatgctgcccgcgcccatgctgggctcggccgagac

SEQ ID NO: 2130 - DNA, 161 bp, Homo sapiens
accacaacaactcgctcataaacagcccggctgctgcggcggtggcggtggagacatgtgcaagcgagggggtggggcacgtggccctgcccgagccaagggaaggcgctcgctcagcactgcctccacccctccccagcactggcgctgcctcgtcacag

SEQ ID NO: 2131 - DNA, 212 bp, Homo sapiens
cgatctcacgtaccagacgctggaatggtagcttgcgaatcagtagctcagtcgatttctgatagcggcggatttcacggagggcgacagtaccaggcctgtagcggtggggcttcttcacgccaccggtggctggcgcgcttttgcgagccgccttagtggccagctgcttgcgcggggctttgccgccagtggacttacgagctgtttgc

SEQ ID NO: 2132 - DNA, 251 bp, Homo sapiens
ggcagtgagccgtagcggagaggctggccccagcccgccacgccgcttccccacgctcgcagccacgcggagccgcgtcctggtccagcctcacccacccagagcaagaggcggaggaactggaacagcgccccggcccgtgggctgccactggccgcagcaacgggacgggtgagagcacctgcccccgacgcgtcttaactgctctggtggggcggggctgaccgtgcaagccccgccccagtctaagc

SEQ ID NO: 2133 - DNA, 213 bp, Homo sapiens
cccacatggtgaccagcctggagaggggtcctcggggtctcccttccctccgccctgttttataatcctggtggggtccgataccccgtggcttagtcccaggaaacagtcagtctacgcggctccgtgccccggggtgtaatatgcccgggaggggcagcgcttggctaccccaacccttcctcctcttctgtactagtccgagcccggcag

SEQ ID NO: 2134 - DNA, 160 bp, Homo sapiens
ggagccggaggaacgggagctgcaggaggtggagaggtaccggcttctccccgggccctcagcttgaagcagggcctcgtgccccggcgctccaggccgcgcccccttggcgccgggtgtcctgccgctgcttgcgcagcggcccttgtttcttcttacc

SEQ ID NO: 2135 - DNA, 153 bp, Homo sapiens
gtcacgtgggattttgttttcaaccgggtgcattctgggccaggaggaggggcctggggaaggggggctgggatgccggcgagcccccggacccctccgccgccgcgtgttcctgtcccgggcactgttgtttttccggtctgctgaggggca

SEQ ID NO: 2136 - DNA, 154 bp, Homo sapiens
acgctgacggtgccggcagtggccgtggaggtgggaacagcggcggcatcctcccccctggtcacagcccaagccaggacgcccgcggaacctctcggctgtgctctcccatgagtcgggatcgcagcatcccccaccagccgctcaccgcctc

SEQ ID NO: 2137 - DNA, 362 bp, Homo sapiens
ggcagtacttacccctcagacctgtgaggccgcggccgccgccgcccccgcggggccatggtgccgctctccgctctcgagcgactggaagctcccgccaagcccctcgccgctccgaacagccaatccgggccgagcacgcgcgcgtgcgcaggacttcctgagcggcccccgggctcctccctggcctggagcgtgagggaaaactgggtctggttattacagcgcaacggagctggagtccatgccgcacaaccagttacctacggtccaaaacatgccaaagttttccgggctttcgcgcccacccgcatcgccagttttccggcgccagaaagcccgggagccacgtgggacggccc

SEQ ID NO: 2138 - DNA, 136 bp, Homo sapiens
cccgggcgggcgcgccggcgtcggacttccgaggcggcggcttctgcctctcctgccgccgccgccgccgccggagctgcggctgccgcggaagttaattgcaacttgacttcaagttgtcctctttccccatacg

SEQ ID NO: 2139 - DNA, 440 bp, Homo sapiens
gcccggccgccactcgggcccggcggaggggcgggcggcgccgcgtgaggcccggcggattgggccggctgccgtccatctggccgtgagagcccttcgattggctcatctcgccaagggaggcgggcatcccttccggcctcggggcggggtcgacgccgaaagaggcgggatctttgaggtgaaggcgcttctcattggacgcccaggctgaggttctttctttcagaatgaaagggaggcggggtcgcccgggaggcggagcgatcgtccgccatggccaattataattgctctgagtggacatcagacgtgcccaacgggctttggattgggtgttcgggggacggggcgtgacgagaagtgccaggtgtacagaaagattctcccttggttcccagattgggtccgcctgtgagaccaggacctcgcggagtagc

SEQ ID NO: 2140 - DNA, 132 bp, Homo sapiens
cctgcggccgcccgccccgaagcaaggccccgggaggcgggaagcgaggcctcacgtgcggcgcagcggctgcgccgaaggcctgccaggctactcactgagccacagctccagcgacgctgccgggcccgg

SEQ ID NO: 2141 - DNA, 112 bp, Homo sapiens
ggccggctgacagcccaggccccgccccaccgccgccgccagagccgccgcgcacgcgcgcttcgacgccacgttcacagccccagaagagagaactaaggcgcatgctcgg

SEQ ID NO: 2142 - DNA, 150 bp, Homo sapiens
ccgccgaaggggcgggatccgaggcaagcgttggttctgtgcgcctcaggtacgtgttgggcggcagtgggcgcggactcggtgcggtctctcgcgggctgcggtcgggcccgggatcctgctcctggccgagtcgcggtgcgcgggctg

SEQ ID NO: 2143 - DNA, 140 bp, Homo sapiens
ggtcagggcggagcctgttttatgccccgaggagtatcttgcccacccgtaaatgctgacagacagctgcgacttcggcccaggagacccggcggggactgggtccgaccagccctctctcgcgggcgcaggtccgggac

SEQ ID NO: 2144 - DNA, 165 bp, Homo sapiens
gaacatccccgggcccctgggtttttgcggaggttgggtgaggttgtgttcactctcctcactgaccccgccgtgtggtcgccggctggtgccttgtctgtctgccccagccccgaatgccccgagactcccggcgccggctcggtgcaggtaaggcgcccgcgc

SEQ ID NO: 2145 - DNA, 150 bp, Homo sapiens
ggcgtttcggtccggacctattcctgctagtgcaggcctccaggtgaggaccgtgctgggcgaccttgggggtgcggggcggcacggtggatcttcactgctccacgcgctgcccggcgtcatgcaggtgacctcactcggacggaagaa

SEQ ID NO: 2146 - DNA, 149 bp, Homo sapiens
cgcccatgctgtatctgtacggtcccgagagacccggcctccctctggccttcgcccccgcggctgctctagctgcctcgggccgggccgagaccccgcagaagcctccctacagctacatcgcgctcatcgccatggcgatccaggac

SEQ ID NO: 2147 - DNA, 371 bp, Homo sapiens
gctatctgacaagtgataaaatgtgtcattacgatttttacacatccccgtgccacagaatggcgtctccttctaatcgttccccccgacagatgatagtacatcccacactgctgctggaaaagatagtgcaaaagttgagcgcgccgagggctctcttttctcccggaaacaatttttccctagacccggaagcagttgttgtttcaagggaggtgggactgggcgggtcaggccgcagcggctgacggcaggggaggagccgggtccactgccgggtggaggggcaaggcgagtgtgtgtccttatcctagcaattggggcgcgggcctgtgagccagttggagttgcggcggcgggaacgattgggc

SEQ ID NO: 2148 - DNA, 144 bp, Homo sapiens
aggtaaggcaagaaaacatgcaagagagaagagagggaagcctaggccaatcggaatgaaaatgtaaacgccacaaccacgttttcagctttacaaatactgaatcttgtagtgggtctagtgggttaggggttagcatgagca

SEQ ID NO: 2149 - DNA, 142 bp, Homo sapiens
tggggtcagccctggccacctcttactttgcgtcttatggtggtacgatactgctaggaatagcgccatgatcacgacagtctccccgttgctatcatcgacagacctcagacttgacaggcagcaacacctctggctgcca

SEQ ID NO: 2150 - DNA, 140 bp, Homo sapiens
cctaccagaggagacggacagagggcttggggaatggggttgctatggcaaccgaaaggagcacacatgacgtcaaagcccagagaggtctagggagggggatgagggggaaacagaaagaggaagcgtctatgtgcagc

SEQ ID NO: 2151 - DNA, 162 bp, Homo sapiens
gccagtgtctccgccggttgaaagcgcgtgtctgcgtcgggttctgttggagtgcgttcggtgcgccgtgggtccgcgctgcttccacccaacttcctgttaggtaagaggcgcgtgaggctcctgtgccgggggcggtgctgctcccgagtcggcgcgcgg

SEQ ID NO: 2152 - DNA, 139 bp, Homo sapiens; identical to SEQ ID NO: 55

SEQ ID NO: 2153 - DNA, 144 bp, Homo sapiens
acaggccggagcgccgaccgcgggaggggccacctgggcactaggaaaaggggccacggttccaggcggggcggtccccgctctgctgactcggacgggcctcacttccccgccagaagaagcggcacccatccacggggaggg

SEQ ID NO: 2154 - DNA, 174 bp, Homo sapiens
ccggaagcttctcagcccaaagccgctgctggctgcaacctccgtcccgcagtccaattagcagccgcgacccggcgcccgcccacgccgcgtcacgagtcagccaaagatggctgcgcccaggtaatttgagcaaaggccacagtgaactccggcgtggctgaggaaggagga

SEQ ID NO: 2155 - DNA, 248 bp, Homo sapiens
ccagatccaggaggcgcggcgaggaggcccagatcccaccacagccgcttccggccggttccacccagcccctcccccgtctggggactccggccccatacactcaccatttcccggcttctgggtgtcccggtgtcctctctagggctcccgtgaatagtgcgggtcacggtgcaggcggcagagcgacagaagttgtggcagagggacccggggcctctcggagtaggaaatctggtatcccgaca

SEQ ID NO: 2156 - DNA, 248 bp, Homo sapiens
gtcccggaagttgcgcgtgccagcgcaaccttcagccaatcagcggccccgcgtggggagggcgtatgctctcggcgggctagagcgccgctgaaacccgctcctcgttctacttggaggacttgttccagccagcgctagtgcgtgagtataaggagagacgggaaggaccggctccatccagccctgaggatcccgaagaaagggtggaaacaccctggatgtgctaagctgtggccgggtacact

SEQ ID NO: 2157 - DNA, 177 bp, Homo sapiens
aggcgtgtagcagcggccgcagaactcacgtggcagctgaaccctcccagctccccagccgcctggcaagaccccgcgtattgataggcttccaccgcccgccgggccccgcctcctactgctccattgggtccttctgcaggctctgccacgcccccaggcacccataggatgcac

SEQ ID NO: 2158 - DNA, 376 bp, Homo sapiens
agagcgagcgagcaagcaagcaagcaagccagcaggatttggaatcgtcccctaattggaaccacaatcgcaggtttcagggactcaggaaagggtgcagcccagcttgtggttgagaaatgaatgtcagatgttaggaagaaaaaggcctatctcaacatagcaggggtttcttactgcccctgcctcctcagccccggtagcctgtcactccctggcgaacagcttggcagcacagaggcaaaccacagagtacatttgaggcccagatctgcttatttcgagggtggggccgcgtttttctcctgccacagtgagctaattaaagaaaacaagcttcgggagttgggagagaactgtccacaggacacttggg

SEQ ID NO: 2159 - DNA, 281 bp, Homo sapiens
actcgtggagtgctttaacttcgccttcgcttttgttttatctccattactcccttcagttgccactggcgacaccactactcgcccacgcttcttactggaggaggcccgaccctccgtagaatccccgcagagccggcctgtaaccccggcgttgtctgccccagcgggccccgttacgcgctaccttgtgacgtcaccagggaagaggcggattctctcctactacagaaagacgtctgctgttttgattggctaggaaagacgtccgttaggacgtg

SEQ ID NO: 2160 - DNA, 218 bp, Homo sapiens
tgcttcttccttctctacgcggtcaacttccggcgcggagtttgtcacgtgcccggatataggaagtgttgggggaacggccgcttcccgttcaacgctttattgaggggcgtatcctagtggcccccatccggtctccgttttggaagacccgcctcggcacagccaggctcagtccggccttgcggtaagccttcggccgcggctgcccggtagtc

SEQ ID NO: 2161 - DNA, 157 bp, Homo sapiens
ctctcggcacatctgcacccgacaaccggcctgtggccttctccgggggtgcaagccacagacaaagttgaaagaaggcgttctcctccggtgcccaatctcgataccaacccctcccctaccagggccaccttgctgctacccaccatcgcgaacg

SEQ ID NO: 2162 - DNA, 523 bp, Homo sapiens
tgcagggcccctcgctctggtggcgggctcggtgagctctgctgcccggtctcgggagtctgggggagcgcggcgtcgacccctgtggagggaggactcgtgtttcaaggacagagcctcattaccatgcacgaccagccgcagctgaggccgcagaggcctttggcaggggggccgggccggcggcagggacggcgttggcggtggtggacgggagtgggggtctgtcctgaacaggtgggggtggtccctgtgctggcccccgccatgcgatcgcaccccaggactctcctcctcttcctaagccccagcatgtgcctggtgccgcgcgggtgctggaggcacagcggcttccacgcagacgcccgcagcaccacagcctgtgcacggcgcatccacgccctgttacaaatgttccattcaacgccttctagcacattcacagatcgtccgcccgcacctctagttccagaacattccatcacccccaaaaggaagccccgtccccttcagcagtcactcc

SEQ ID NO: 2163 - DNA, 157 bp, Homo sapiens
gtccctagcccagttcgcccgggcccgcccctagcaacaagatcgcggggaggggccgaggcgaaacacgagccccgcgcccaccaccccagctggcgacgtggctccgcggccccggcttcccccggcagctcagcgaccaatgggcgcgcgagcg

SEQ ID NO: 2164 - DNA, 143 bp, Homo sapiens
ccacggccgaatcttatttctcagaatccccaaggggagcgggcttcgtgttctcgtcctcaaatagtcgaagtaccaccgaacccactgagcactggggtataggttcctatttccccaggggagcaaataacaaagccgcg

SEQ ID NO: 2165 - DNA, 147 bp, Homo sapiens
gcgcattggctcgcacctggctcccgccagccgtgggattaggcttcgccggctacgattgcggtgagacgctggccagcggccggggctcgcgggcaggagcgggctgggctggggccgatctggcacaaacgacagacccgaggg

SEQ ID NO: 2166 - DNA, 141 bp, Homo sapiens
agcgcggtgcttcggtggcggaggtcacggtggcctccatcctaaagggctgcgggcgtcccggacggcggtcccaagcgctgctcacgctgctcttaagtgagccctggacgaggcgcggtgggccctcatagtccgcgc

SEQ ID NO: 2167 - DNA, 144 bp, Homo sapiens
ccgcaaggtgaagaaaacgaacaaacaccgagttgatacggatagtccccgttcccctgagggccgaccccgtgactcccgatgagcgtccagttgcgccgggcatcctggcctcccagcgtctttcccggaggttcatcgccg

SEQ ID NO: 2168 - DNA, 236 bp, Homo sapiens
agccgtttcccgtatacatttgcccttaagcaagatggtgggcgccttgtgcacatgcgcggaagggttgtttcggcggggagttccgccgcgtcggaactcgctccgggcgtggattggcggcttgctggcgggggcggaaccggaagttccgtgttgtggggctcagctggttcatttatgttgtttttcctgtacctaagttcccgctgtaggtggtacctttgcagacggtg

SEQ ID NO: 2169 - DNA, 249 bp, Homo sapiens
acgttgccatggagaagcgccccgggcgggggaggggcggccccacgacaatgaccgcattgaggctgcgcttggcctcgcgcctctcctcgaacagcccagcgtcctctggaccgtttaaaagaaaacataaagaggactctaccattaagatagtccttacaatttcgcaagccctttcacgtgcattatcttgtggatcctctcagtaatcccctgcaagaaggaatgaaagtgagtgtttgtgaa

SEQ ID NO: 2170 - DNA, 140 bp, Homo sapiens
cgctggacaagcacgagggcgcgctcgagacgctcctgaggtgggcgcggggctgggagtgggtaggttgtctgccagccgtcgctcgccgctcctcttcccgtctccccccttccttcaatcctgtaacctgggcggag

SEQ ID NO: 2171 - DNA, 267 bp, Homo sapiens
taaatgaagacactcattacaagacttaggaagttgcagctggtttagctttcctgcgcgcccaggagacggagaaggaaaactacgactcccagagtgcttagagagaacacgcgcgtcgtggcctcaaaacttgctcccttagtcccgcctcctcacttcagtgattggattttccacttccgcgcctctggaattctcttcacccattggtggagactcctgcggggtcaaatacagaatttacgcacccttggcttccttgga

SEQ ID NO: 2172 - DNA, 161 bp, Homo sapiens
cgtctgttcctgcagatgcagagaggggaagatttcaagcacttttcgtctccatctgagttgcttcctctcctctgactcgttcctgccttggcagtcctggctgccgtcttctctatgctgccaacatcccctgacctgactcttgccgccaactgaag

SEQ ID NO: 2173 - DNA, 149 bp, Homo sapiens
ccgccgagagcatgcccttggctcatccaatcagagcggcggatccaggcgcctgtctgtcgccttggcaacgggacgcataagcacgcgaggcgcgcggtggcggtttggatctggcccctggggaatcgcgttatgtcgcgaccgaa

SEQ ID NO: 2174 - DNA, 198 bp, Homo sapiens
acccctccccacccaccaccgctcccgcgggaagccagcccgtgcaacggaagccaggccaactgccccgcgtcttcagctgtttcgcatccaccgccaccccactgagagctgctcctttgggggaatgtttggcaacctttgtgttacagattaaaaattcagcaattcagtactgcgtcgaggtcttggttactt

SEQ ID NO: 2175 - DNA, 145 bp, Homo sapiens
agcccgcgggcgggagggggcgaaggtctgcggacacgtgtgaacacagcctgtgaaccgagccacatctgtattcacgtgacccccggggccccagcactgacccaggaaaactcggcatttggatctgagctgattcacactc

SEQ ID NO: 2176 - DNA, 143 bp, Homo sapiens
ttcgtgttcggtgctggtaccagaagtggcatgggtacaagtgatatgtgggtcacccacagagagagacgcagaacgaagcttcgtgaccctccaagttcagtgaagacacccaaagcctggggcaaaacgaggcggcagcc

SEQ ID NO: 2177 - DNA, 151 bp, Homo sapiens
cctggccttttcccctccaatcgccaaggctccggtggtttccaggagtaacgaggggacctggcgggctcctgccccgttaggcgtccccgcgcatgcgcaccgcttcccgtggcaacccggcgcccacgagggctcgcggcagagaacg

SEQ ID NO: 2178 - DNA, 153 bp, Homo sapiens
gcttgcactctgcctacccctcggggagggcggctggcagggcacagggcgctatctaccccccagccggcagccctgcgcctctgctctccgctttggggtcttgatccgccgcctcctcgctggcagttctcgtgactcggtgcgcgctcc

SEQ ID NO: 2179 - DNA, 150 bp, Homo sapiens
acagatggatggtttccaggggctgcgggaagggaggaaggaggagtgacagcttcatgggtatgagtttccttttggggtgatgaaaatgttccaaaactagaaagtggtgctggctgtacgtgcatcttgtgaatataccaaaagcca

SEQ ID NO: 2180 - DNA, 156 bp, Homo sapiens
cgccgacgagcccatggccccggctgaaggcttggcgctgaggagcagacgcccggccgggggaaacggagcaggagccgccgcgatcaccagtccatggcagcggccgccgcgcccgccagcggcgccccacttgctgcctcgcccgtgcaactc

SEQ ID NO: 2181 - DNA, 135 bp, Homo sapiens
gttgatgggaactcttgtggttgggtttcctggtaaaagaccgaggcagaggttctggggaggctctcgtggagggcagacaatgcccacaaggggatcccgacagcttccacggaggctcaggactggaagggc

SEQ ID NO: 2182 - DNA, 146 bp, Homo sapiens
gcccgcccagtccccccaaacttgaggttccaacgctgcagaagctcagcgtggtccagttaaaccgtacccacaagttgccacaggggagcgaagtgcccagggctcaccccaagcacatagacgcacatcctagctctttcaaa

SEQ ID NO: 2183 - DNA, 141 bp, Homo sapiens
cgaagtcctcgcgaactgaactgagagcagacaaaagcacgcgctcttctccaccgccacgccggtcctacccaaacccgcgagttatccgtattctccttcaggagtcatagtcaggccagaagagtgcggagggacggg

SEQ ID NO: 2184 - DNA, 283 bp, Homo sapiens
ggtctactccggcgagtccaatcaccgtccgagagcggcggccctcgccgctccgggccccgccgccctccagagtgacgccactaagcatccaataagttttggaaattccacatcttcgccagtccactcacgcggggggcgggacctgacaaggccgtgggcggggcggccgaagggcttagagtgcggcgggaggaaaaggccaaggctcggagcgagcggcatagtgtagtcagcgtcaccgtttcacagggactgtccctctctctgtggtgaccag

SEQ ID NO: 2185 - DNA, 146 bp, Homo sapiens
tttggtggtggcccggccgcagccgctgaagacgatggcgcgcgtggctggctgcgccatgctggcggtggcgaaggccatcaggttccggatcttgctgccttccttgacccgcatgtgcaccgcgcccggcgccaggtctgcga

SEQ ID NO: 2186 - DNA, 241 bp, Homo sapiens
acagcaacctcgggaggataaactccagcaaccagaatcgggttggcgtcgcctagcaaccaggagccaaatgcgcggacgccaggcattggcctgcacgtgtcacgtgagccagcgccgctgcccagtgggagattacgccgcaggcacgtgatgcggcgcaaccgccctttggcagagcttttcgcgaaggcagttgtggctctgagcgcataggcgaggcattcctggggtttgcgcc

SEQ ID NO: 2187 - DNA, 281 bp, Homo sapiens
cggccaggcctgcggctgccgggaagccccctcgggagcgcgcacgggaagggctgtgggggcgctggccggctgcgacgtcagacccccgcccctcggcgcctgccggacccagctccattcccagccgcgcctccttcggtgggcagccggccggaactcacgaatcagagcagccgacacatcgtccgctcagccaatcgtagcagatgtgtgatcccgccacctccccggaccctggcggttgtcgctgagttggcgaccgcgggagacgctgctga

SEQ ID NO: 2188 - DNA, 146 bp, Homo sapiens
ctaaacgccaacttagcaccagctccaacccctcgaaggccccggccagacaccccagcagaggggatgtggtgtcagcacctgtaaccaaatatgaacccagtcgtccctgtggtttgcccggaggagataaactctgggtgtat

SEQ ID NO: 2189 - DNA, 135 bp, Homo sapiens
tgagagccagccaaaaaggaaaaagcaaaggcagaaacggcatcaggagagacagagatgtgaaggagggaaggagcaggagagcaggaaggaaacgcaggaggagggagcagcatctcctgtgaacacagagga

SEQ ID NO: 2190 - DNA, 156 bp, Homo sapiens; identical to SEQ ID NO: 47

SEQ ID NO: 2191 - DNA, 349 bp, Homo sapiens
cccaactttagaggggatgacaccaggttcgagaggctgaagaagagccccagaatcactgaaagagacatggggttttcctgggggctttcatacaggagagagggcctggtggcggcagcctgggcaggaggaccacagccgcttataaaaaacatgcaatggcaacctttacttaccccaagacaaagggcctccatcccttgtacagcctgagttccacaggatgggccgggggctcagatgttccctgtagataaggaatcaatctccgggttgccactcctggattctagttgagaactttgaaccgcattgaggtgcatccaccacatggttcattctcagg

SEQ ID NO: 2192 - DNA, 147 bp, Homo sapiens
gtctttatctcttctcttttcccgagggtgctcggggcatctatgggtacatctgtcgcctgccttcagcccctaccccgacggaaacgctccccactatcccgccacctggtggtcgcagcctcctctcttctgcaggagtgaagg

SEQ ID NO: 2193 - DNA, 142 bp, Homo sapiens
ttcactgacacccggacgtaagacaggaggatgaccagcagagggagcaggtaggtgaccagcagcagcccccaggcgtagagctggcgctggcgctcctgggagccccagaactcctcgcagaggcgcacgtcgtgcggct

SEQ ID NO: 2194 - DNA, 775 bp, Homo sapiens
tgggcaaatatttcccggggcgctacgctaagcacacgggctccccgaatttccctccccagggcctctctgtctttggatggcctgtcagcaagtccctgcagcctccagcccggcccgcgcggcgacccagtcccctgtcgcccgaatcttccaccgctgcgaagcgtccccgggcgagcgccctgctctccgcgctgcgcggaagccagagccggtcctcacagtgaactcgcccagccctgctcgcggctctctcgattttatgtgggtttcgttggatgcattttgttatttgcctcaatggatgtttcacattaatttttagttgcacaacgaacgcgcgggaacattctccgtgagagaaaaagcacgggtggggggcggttaccggtgcttcccccggtcgcctgggggtcccgcacgcgccccgcgggtgccgctgtctggctggggtccctgggtgagccgcgggcaccggcttcgcgtctccccgggcgcgactccgctttgcaagcgctcagcacacgggaaaccctcggaaaacacacacgtgtgtaaagtttgttccacgcagaaacaaaggacgcgtgggggccgcttctggggcctcggtcctttgttggaaccccgcaccgcagcccggcccgcagcctcgccccgcaaggggaagccggccctgcacaggcccggggcccggaaggcgccgccgcacagctctgcgcccccgacccgctccggccgcgcgctgggccaggcccttggcctcaagcct

SEQ ID NO: 2195 - DNA, 144 bp, Homo sapiens
ggtggtgacatactggggccccatgttcccgaagtaggaacgttcccactcactcatgagctcaaagtgtacaggacggcgacagaaattgcaggcagccacagacacatcctggaggggcagccccaccgcagtccaagccag

SEQ ID NO: 2196 - DNA, 282 bp, Homo sapiens
gccttcctcccgggccccgccggccggcgaggggcgggcgctgcagtgcacgccgggggatgtagtttggctcggacgagagcgtctcgtcccggggtcgcgcgttgctccgggtgccaggttcagcccgcgcggcgacagcgggcttcggcccgatttgatgtatgtttgcgtctagacgtcgtcctcactgtcatcgcgctttgctttgccaccctgacccgaattcctcgtttcgcgtcttgactgttagctttcggccctggaaagatagccgggcca

SEQ ID NO: 2197 - DNA, 156 bp, Homo sapiens
actcggcctgcccctgcttttcttcctcaggctcccgagttgtctactcagaaacgcgggcgttgtttctcacatcggtgtccccagctcacaggcttttcttgctcctctgaactgggacgggcgtcgctgaccgcttggcgatgtcccaagtcc

SEQ ID NO: 2198 - DNA, 141 bp, Homo sapiens
ctgagtgctgttgagagggaggctctggagtcccgcccgccccggcgcggctgagccctgggtacctgcattaagtccgcccggttcagggcgctggccgccaccttcaggaggacttcaccctcccccgggctcggcttg

SEQ ID NO: 2199 - DNA, 130 bp, Homo sapiens
gagggacgcccacccaacgcgcatgcgcagcctcaatgctgggattggacggagcctcgccggctgcgtacacgtcacttccgaggcgggaggatgaagttgattgactatggtctctccggctaccagg

SEQ ID NO: 2200 - DNA, 135 bp, Homo sapiens
gccccctggcggccagcagcgtgcggcccagaagcgcgtagcaggctaccatgacgcccagcggcagcgcgaagcccagggccacctgcgccacggcgctcgcccccttcaccgtctgcgtgaggccctcgggga

SEQ ID NO: 2201 - DNA, 263 bp, Homo sapiens
tttagaaaagttgctgtattttactatcacgaattttttttgtgtgtgtgtgtggtggggggatttgcctcctttggtgaaccccagagccctgtggccaaggactgcgtcttagtcatcaccctgttccctccttgtttcagccaggctgttcctcactagggcctcacagccacatttccccactgcctgagcgctttctcagtgagtctgtgcccagctacggttgcctgattggcacttggacttggctgtggcagaga

SEQ ID NO: 2202 - DNA, 184 bp, Homo sapiens
tctcaagttttatcatcgccggcgcggctgaggagctgcccgagcctgcccctctgctccccagcagccacccgggcgttcgcgctcgggaaagcggtctctggcgcaccctctgccagttctcccacgcccctcggctgccccgcggcgctgccgccccgcccggcccgcagagaggccctgg

SEQ ID NO: 2203 - DNA, 168 bp, Homo sapiens
tttccttgcagttctgcttccggccctcggcccttcccacagcggggcgcccccggcccgcgcccggcccccgagccgctcgctcccgggctctcaccgctcgaagagcagcctcacgaagaagatgcccgccgccagcgggaacaccgagaggatgtgccggccgcg

SEQ ID NO: 2204 - DNA, 154 bp, Homo sapiens; identical to SEQ ID NO: 110

SEQ ID NO: 2205 - DNA, 214 bp, Homo sapiens
ccgctgcacgcccaacggccgcgcagtctcgaccccacagacgcggcccggagaggccccgctcggcgcggctggtccacgccccgcccacgcccctgcccattggcctccccgagacccgctggcagaactttccatactattggctgcgaaacctgccactcatatgcgactccacctctcctaccggcacaggaaaggggtttcctcccgc

SEQ ID NO: 2206 - DNA, 247 bp, Homo sapiens
tatacagattctacaacttcccagacgagtggccctgagacttggggctgaacgcgcgagcacggaaagaaatcccaccgtaggacggaacccagtctcttcagctccatcctaaacttcgcaagttttctctgagtctacgcgcttccttaggactacaactcccagcatgccacgccagcggtcaaagcttattggtggtcctgccaggtcgcttgcgttgtggcagtcatggtagccaatggaa

SEQ ID NO: 2207 - DNA, 244 bp, Homo sapiens
ttctagtcacgcctcccaggcagcgtactcctattgcgcaggccccatgcgtcgtctccgctgcaaaccagtaggtggccggcctagagcccccaagacccctcaggcgccgccatcttgcttatcgtatccgtatggtggccgaatccatatgttcgccgggaacatggccgcgctctaatgtggctttcccgagggcgccgccaccttgtcagtagagtccgtacggcggctgcttgtacgg

SEQ ID NO: 2208 - DNA, 236 bp, Homo sapiens
ttccctccttctctttggcccctgctaccccgcctagcatcatttcctgtgcgctggatgctgattggtccgacagtcggaagtgagggcgggcggtgggggccgttgccgcagtgacagtgctaggggagtccgaagatggcggcgtcgcgtcgctctcagcatcatcaccaccatcatcaacaacagctccagcccgccccaggggcttcagcgccgccgccgccacctcctcc

SEQ ID NO: 2209 - DNA, 259 bp, Homo sapiens
ccagtcttggcacagcgcggggagcctctgcgcatcatgcgcttcggggtgcatctacggtatgtcacacagccacccgcaccgagagtctttccaaacctccgtgtgtgcaatatgcaacaacgtgcgcgtgcggagctgaaagggcacaagacactccaggctcccacacgtatggagacggatcggctgcgtgtccacaccccgttcgtccctggtccattcgtgcccatctcagaagatagattaaacataataa

SEQ ID NO: 2210 - DNA, 148 bp, Homo sapiens
ctgtcttgaatacagctcctcatccagtagcttcgaagcgtccagggcatccatcctcaaacctggggctgaacagtaggctgcagcgctcagagatagggtctttgtgtaggtggcggtgacagtaggggccagtgccctgctgtag

SEQ ID NO: 2211 - DNA, 251 bp, Homo sapiens
cagattaagcaaccaaggtcaacaacgacttccatgacaacagagccaagctggcactcaggtctcttcacacctggcctgtgctttcctgctccaccaggctgccaggggtggttcccatgagctgttttaggcccatttttggaaaaagagtcatttggtttcatttgtcttagactagatcccagagatgttatttactgttcccaacccccgatataaaaccactgaatgtgcaggccctctcatca

SEQ ID NO: 2212 - DNA, 149 bp, Homo sapiens
cgggagagggaagcggctatttcttagcggaaagaggaacagtggcccaaggcggcgcattcccaggcccagaagcgcgtgccccagatgccttcaccctccacgcctaacccggttggcgcaggccctgggcagcaggaaggcgcgcc

SEQ ID NO: 2213 - DNA, 143 bp, Homo sapiens
ggtgccagggacttggaggtggaggggacgcggcggtactctggcgtgtgagccgagggtggagtgcagagggagcgggagcgggacgggaggtcttctagctttggttctatggtggcagatccggctgggttccgggaagc

SEQ ID NO: 2214 - DNA, 126 bp, Homo sapiens
ccctaaaggctagatctcgcctcgccattcccatcggagagagcaagcggcaaggctgagaacagcgcgatgagaaagccgagcgcccagaagcccgagtgcagacgcccactgaggacagccttg

SEQ ID NO: 2215 - DNA, 136 bp, Homo sapiens
actaatctgaattgtttgcaatggtaggaacttgttatataaaatgttaattaggtggcccgtgctcgaaaactgctctcaggatatgaccaatgggagagtagacctaagctccttcatttgcatgcagacttca

SEQ ID NO: 2216 - DNA, 217 bp, Homo sapiens
cagtcccttttctttcagccactctcgggctcggaggggacgcgctgagcagcaggacgcctgccgccgcagggggcgaagttgggaaaacttggagtgctgctcgccttacttttgctttctcgctccttccaggccgcgccgggagcccccgcttctcccgcccgccgggtccccaagcccggagtgggtcccagctgcgaggcgggcggcggcg

SEQ ID NO: 2217 - DNA, 132 bp, Homo sapiens
ggaaatgagaaaggcttttaccctcacccccttcccgatgaactagtccaggcagtcggcctcatctcacgtctgttgggcttctcgggaagccaaatggtatcgcacgtgttaaaggcgggtgtctggaag

SEQ ID NO: 2218 - DNA, 222 bp, Homo sapiens
ggcctgtttgcgctccctgcggttacagccgacacacgctcgcagacgcacgcacggacaccccgctttccaccagcgcacgaagacgggacgcgcgctcacagccccagggctcggccctgcaccacgagctaacgcgcggtccccagggaggtggcgcagaaggcatggcgcctctgcccacggcgtcccggtcctggtagtccctatagagaccttcgt

SEQ ID NO: 2219 - DNA, 152 bp, Homo sapiens
catcaacagatggaaaggcaaacccctcagccatgagatgttgccgaagtttactccaaacaaggaagtcgggaaaatcgccacgcccacttccttctagccactgcccccagcactggcctggagccccgatagtgtttcttctccactgt

SEQ ID NO: 2220 - DNA, 161 bp, Homo sapiens
aaagttactgtgggaaagaaagtttgggaagtttcacacgagccgttcgcgtgcagtcccagatatatatagaggccgccagggcctagggatcacacaggatccggagctggtgctgataacagcggaatcccccgtctacctctctccttggtcctgga

SEQ ID NO: 2221 - DNA, 147 bp, Homo sapiens
gctcttagcccgagtcatcctggagccccagcccccagctcagcccttgccagcatccgttctctgcttagctcagtgttcctctttgtgctgtcgccacagcatgtccacgtgactccatttccccgccccccatcaccccatgag

SEQ ID NO: 2222 - DNA, 336 bp, Homo sapiens
ggcagggccagagtgtgcacgggcgcagggcgaggtgggtgcagatgtggcaggtgcagacgcggcgtccacagccaggcctaaagacggtgtctgaagctggggaaacccaacagtgactcgttatgtaagcgtgtgacttagcaagacagaggaaaatgcccaaaccgccggtgagaagggctcaaagcagtcgctcaaagcagcaggaagtgatgtggcgggaaggctggttttagggacaacggctgagtttcggtggaggcttgcatgctgtgtgactcttcagacctggctcatttcacgtcgactcttcttgcccattacgtcatttca

SEQ ID NO: 2223 - DNA, 149 bp, Homo sapiens
cagggccctggacccgtccccgcaaccccccgccccgtctcactggcccgggttccgggctggcctgtggagaacccccgcgagcgcaccgcactccaatgtaaagccagccactgccggcccgcttcccaggtcgcttttctctgaaa

SEQ ID NO: 2224 - DNA, 138 bp, Homo sapiens
cactccttggggaacctggtggtccctgctcccgggaggtcaccacaccgatgcggaacacagatgcgtgtcgccgcgcaatgggcacagcgcatacagcgcagagctcccgggctcaagcgctgctcccgcctcagc

SEQ ID NO: 2225 - DNA, 144 bp, Homo sapiens
ccgacacttttcctgccaagaaggtgaagcagctgcgggtaagagtataggtttggcagtgggaagtcgagggcgttcccgtcgaagctccttttgtgtataaggcctaagaaggggcagtgcgctttgcgaaggtctgaaaaa

SEQ ID NO: 2226 - DNA, 206 bp, Homo sapiens
cagccttcccagtaggggcttttggaatccgcagctctttctagaggcaggatgtgggggctgttttttttttttccttttggtaaaaccaaaagctccttgttgcttttgttgatgtctttttgttcctccttgaacacaaagctgtggtttttgaagagatccaagcctggaacgggcgaggctctgtgtagaaagggcgctgg

SEQ ID NO: 2227 - DNA, 280 bp, Homo sapiens
aagagtaaacctgggcagccggccctacgctgttgacgtggggcgagggcctgtcctggagctgcggcgcggcaatggcgtaggcccctttcgagaatcaagccagcgctccacgtggcgggccagcccaccaggccccggcagcctggaagaggcgggactcgagttcagggggaacgcccacgtcccgggaggggacaggggccggagacaggggcgaagacaccttcgaaacgccgccccactgggccttccagggaggtagaagaggtgcctggca

SEQ ID NO: 2228 - DNA, 161 bp, Homo sapiens
gcgggcagtaggtaaacgggcgctcgccccgggttacactaggttggaggctcagagaaggaaaagggattagaggcgaggctccgggtcacgggaaaaggtccttggcctcctgtcatggatggtggcgcccaaggcccagggtcgccgtctctgcgctc

SEQ ID NO: 2229 - DNA, 152 bp, Homo sapiens; identical to SEQ ID NO: 179

SEQ ID NO: 2230 - DNA, 215 bp, Homo sapiens
tgtttgctaaacaaaaccaaaccagtatcgggatttcagccacttctgcagcagggcggggcaaggcggaggagctgagctgtgaggggaagccagacaatgttccttctttgtcgactgaggtttggcgagatcgagattaagcttgtcgggctcctccagtgagtgggtgtgtggggtggcgccagcggaaggccacagcagcctcagagcag

SEQ ID NO: 2231 - DNA, 350 bp, Homo sapiens
gatcagtttctgcctggaagaagagcgcgccaggatgagtgggcacaaactcggagggcccagtgggcgggtcttatcacccacatcctggggagctgtggagaggagagggtggtgggtgaggtggggctgggctggtggctcagataaggcagggacacacagctgggggagggtggggctgagatggagggcgagcggctggctggcgtccgaccagggccaggggcagctgagctgtcccttccgtcacctggacctgccttcctctgtggtgctctctcttcctccctccctcccctcttcctgctgcagctcgccctttctatctctttgtgcacggaggtcgc

SEQ ID NO: 2232 - DNA, 141 bp, Homo sapiens
cacatttgtagtgcaagctgcttccatgttgattttgatgtgtggaggctgcagatcctgcgggaggcaaattttcagacatttgggtcctcggcagctgcagcagagtttcctgttaactctaactgccttttgcacatt

SEQ ID NO: 2233 - DNA, 166 bp, Homo sapiens
ctgacaacagcgccggcgtctgggctgagcttcggactcgcagccagcctcccacaggccaccgcgcgcgctcacttgcgcatgcgcctcggagctggcttcaaccagcgaaggctgaacccgcttccagggtcctcgccgagctgggagttaggatccgaggggg

SEQ ID NO: 2234 - DNA, 143 bp, Homo sapiens
cctatggccctggtaaaggatccgcttccgatcgggtggggctctggtcccgaggggccgagtcgggccttgttgccgggccgcagcgtaggcccctcgcccgggacctgagggaaggccctggacggctgcggcacgcccgc

SEQ ID NO: 2235 - DNA, 149 bp, Homo sapiens
ccttcctggtggcccgcgaggagctggcgagcgccctgaggagggattccgggcaggcgttttccctggagcagctccggccgctactagccagctctctgccgctagccgcccgctacctgcagctggacgccgcacgccttgtccgc

SEQ ID NO: 2236 - DNA, 492 bp, Homo sapiens
cttgatatacaaatgcagccagaggatgacgtgccagctctggggctttgaatcactcaggcgggccagaaaccccactgaaggcaaaagaggatgcagagctcagtctgaggttagagtgatttcactgaggttagcacacacgcaccaaagagtcccaaacagcttgcttcgtaacccctctctggggtttggtgacatctggggtcacttgaacttcgttgggattcagctgttcagagatacaaattaggaatcccggcagcagagaggccctacccacaggcccagaggtcgctcacattacacccggcttccttcctggcaaggccttaacttatcctgagatgacacacgatggcaggggttggaagatgcctagtctagttgagcgcccagctcctgaaacagctgtaccgactacaagggttccagcacatgagttgctggaaactggggtgaccactgacagagattgagccagactttttt

SEQ ID NO: 2237 - DNA, 146 bp, Homo sapiens
tcgaggcgggtaaggggctgtttagagacccgagccggcctgaaatggcagcgcggggttactgaccacagatcagcgccccggtcgagctgcgacccagcttcagcctctgaaccccgagcccgccaccacctctcccacgaagt

SEQ ID NO: 2238 - DNA, 170 bp, Homo sapiens
cttagtgggtgtgagtttcaggtccgtgggtaagtaagtgccaagtgtgcttaaagtctgatgctgcctcacttcctgtatttcagtgacagctcccacaatttgggtggtgtgcagcctgtatttttaataaagaacttgaagtagccgatatttttgttctgtttgag

SEQ ID NO: 2239 - DNA, 144 bp, Homo sapiens
tgagagcaaggcagtggttagaggtgaggggcgggtgttagggctgagagccgggtgatggttacaggtgagggaagttgttagggctgagagccgggtgatggttacaggtgagggaagttgttagggctgagagccgggtga

SEQ ID NO: 2240 - DNA, 223 bp, Homo sapiens
ccacggggagctttgcggtctcctggggtaccccccacccacgtccctgctgcaggctcccagtgtcctgccccggcgtcgagtgcgccctgctggctccccgacctctcccgcgatctgttcttgttaggattttgtttcgcgttgagcggagccacgcttgcggcttctgtcctctccgcgcctcgtatcgttcttttcttgcactgaatcaagtcagcca

SEQ ID NO: 2241 - DNA, 190 bp, Homo sapiens
agacaacctgggcagggaccctggagcctcgtggcaccacagggctgtcagccaggctgctctgccctgagagcgtggctctggtgtgcccgtgatgagacaggaagggtggggcacggggcccagcatgccagcctcggccctgtggttaggccgggctccttgggtctctgtgtgctgtgtcatccac

SEQ ID NO: 2242 - DNA, 139 bp, Homo sapiens
gcggcgacgccaccggctggaggaaggcggggcggagggctgcagggcgggctaaggactggggctggccggccgcatgcgcgcgcggctttggtaaagaggctggagtttctggctcggcgaggttgtgggggaggga

SEQ ID NO: 2243 - DNA, 137 bp, Homo sapiens
cccgcccgcggcggccaggaacccgaccgccctccgctctcaggtacctcctgaagccagctgtgccgtgtggatagcgttagattccgcagctttccacctgcgctgctgggaactcacctgaaagggaaattaac

SEQ ID NO: 2244 - DNA, 137 bp, Homo sapiens
gggcggagcgagccggagtcggatggcggctacggcggctcattgttttccgctgcaggggtgctgaaggggggacgcgggtcggacgcgtccggctgtggaagagagcggcggccgctcacaacatgcacagcctg

SEQ ID NO: 2245 - DNA, 137 bp, Homo sapiens
tcggagacagcctgggcaaagttgaggaaatacccgggttggagcggataggagactttgagaacgggcgggatcccgacgcgcaggctgatttttgagtgcctgcggctgaactcggggcgccgctgggcctggtg

SEQ ID NO: 2246 - DNA, 248 bp, Homo sapiens
acatccccctcccgtcgccacgggctcttcccgccagtgtagccacattcctgcccctttccagttagcccttcgcgttcggcttagtctgcggtcctcttgcattgcgactccgagtttaacttccaacacacactttcaacctccaagagacgcccccacctgtgtcgccccaatagcgacttttctcaccgtggtcgccgcggaacttcaagggtccttcctacccgcgttgctgagagtctggg

SEQ ID NO: 2247 - DNA, 172 bp, Homo sapiens
atgtgccttttggtattgctaatccggatataatgctcttggcagttggctctcaggactgtgcttagtccctgagcacaaaagttcttaccttggttgggggtgggcagatggtacaggtggattggaagtgaccgtctgattatcatttgggattgagtctgttgtgtgc

SEQ ID NO: 2248 - DNA, 142 bp, Homo sapiens; identical to SEQ ID NO: 435

SEQ ID NO: 2249 - DNA, 207 bp, Homo sapiens
gcgtgggggtggtgaaccggggaaatatcggtggaggggggccatctccctaaagggcagagggtgaggtgcggtgaatagccgtatccggaaaccgagcgtgccccgggcttctttcccgccgccagaccccgcacagccgccctgggacgtttttcgaggcttgggacctaagacgggtccccggaccctgctgggaaaccaggg

SEQ ID NO: 2250 - DNA, 152 bp, Homo sapiens
tcagtctcaggcccctgggagggggaggggaaagaaccagggctgagctgtggagtgaaggggagccatttctctccaccgactgcaacctccgtgctcacagctcacggttcaccagaatccaggggcttggtcggcctaggaatccacaa

SEQ ID NO: 2251 - DNA, 242 bp, Homo sapiens
gccgcggagctgcaagggggggcggtttctcacccgccccgagagcgccaggcctcccttcttctgattggccgagccgagtcgtcacgagccatgattggctcagggccaaccaccccgccccttcacctagggctcggcccaggttctgctccctgacacgcagaggccctgcgtccccacacgccttggttctcgtcaggaggcgcctttctgccttccccagcgggaggaggcgattg

SEQ ID NO: 2252 - DNA, 150 bp, Homo sapiens
ttaggacctaagttatccaaggtacataaagcaacgggcatgcatgtggcacacagtgctgctcataaagtgagttcctcttccttcctctgtctttgctcccgaaatttattgattgcacaggttttgagtagagaatccattctgcct

SEQ ID NO: 2253 - DNA, 158 bp, Homo sapiens
agcaaaacaggaacataacccaagatcaaaggcccagtcgcccagaagaaggcttgaatcagagaggcaggcactgacccagggcacagggtgcatgaagccgggggtgagcgcccaaaggacaggagtgcatgccttggagctcagatgtcacccta

SEQ ID NO: 2254 - DNA, 161 bp, Homo sapiens
ttcttctgtcctctcttctcctatttccccaggataccggccatttctggaccccagcatctcctcagagttcgtggcggcctctgagcagttcctgtccaccatggtgccccctggcgtctacatgaggtgagggaggggctcaaaggtgtgtgtgctgg

SEQ ID NO: 2255 - DNA, 217 bp, Homo sapiens
acttcctttcactacctgcaaagccttctgttactttctgttctactcttcccaggccgcaccaccccccacatttcaacaatgctcgttgaaatccacgaaactgatttcccaatcccctaacggtttatggtcagcaatttggaaaacactggctgaaatactaatgaaagggcatcgcgggccttccctgatgcgaggggaggaaggaaggctt

SEQ ID NO: 2256 - DNA, 147 bp, Homo sapiens
ctgagctgattttgcagctgagtcaaggggataacaatgctgacctcacaacatagtagggagcgctaaatgggacagtgcctgtgagacaccgaattcaaaccctagcacataataggcacatactcatttgagggcttctgctcc

SEQ ID NO: 2257 - DNA, 191 bp, Homo sapiens
accgtctcgaacctatcttcgacgccatcttgggaaagggcagtccgctgcggcctcaccccagtcagagaagcaggcgcggggatgggacacgcagcttccgggtcaagcgctttttctttttcctcccggaaacaacggtgtcattctctagttccggatctaaggtgacccagttgcgaagtccagcc

SEQ ID NO: 2258 - DNA, 287 bp, Homo sapiens
gtgcaatggcgtgacagctcggccctggttgccaaggagatgcgagtaccggaaatgcggaattcggggagagcgcgcatgcctggtccggtggagggagggtgccgggcgtcacaggtcctgacagggaagaagttggcaggtcctggcaggggacgagctgcggcggtggcacctccgggtgtggaaggctccagtgagatggagtcgcgagtcgcggacgctgggaccggcgagaccgcgcgagcagcgggcgggagtccggcagttggctgcaccactcgggg

SEQ ID NO: 2259 - DNA, 218 bp, Homo sapiens
ccctgtggcagagccgcgacaagccaggcggcagctccgagcggggagggcaagtgacccggatgtacagggtaacgacggggagggggaggagggaatgccaggaagtgagggcgccgcggacctgtccggccgtgcgcatgcgccgcacgcccgccccgcaaggtaaatccttagcctatcttctccgcccctcatccccgcccctcccgaagggg

SEQ ID NO: 2260 - DNA, 452 bp, Homo sapiens
gggagaggggaaggggggctcagtcctgaccgggacccatcgccctctccgcggggcgcggggccaggcgcgcagatgcgcccagggcgcagccggacgatcccgggaagccggacgtcgtggccgccgccgcttggccacgtccgagtggagagcgggaccgcggctgcgggcgctgctggtcaccgctcgtcgcaggaaccccggcgggggtcgccaccgccactcgcgctgccttctcgccctgcccggctcccgggcgggaggtagagccggccggcggctccccgggcgccggctggagggcgggtcccggcagggtctctgcgcgtccgtcggtccgggtcgcgctgggcaggactcagcgccgggctccagctgcccgcgggccggtgccgccgccggcgccgcccgctctcggcttctgccggtgattgtcaagtgctttggaa

SEQ ID NO: 2261 - DNA, 145 bp, Homo sapiens
cactgggtgcagggagagtgtgcagtcctgttttggggaccgggcaggaagcacaggaagagtacggtgccccttcccgcagtccacatcacagccctccctgaggccggcggggaccgcggggtgccaggcgcgggcctcctcg

SEQ ID NO: 2262 - DNA, 82 bp, Homo sapiens
catgtcccgactgaaaatgggcttcacgaaggtgctggcggtagaagtagcttggcggacgccgctccccgccatcttgcca

SEQ ID NO: 2263 - DNA, 147 bp, Homo sapiens
tgcccaaggacttcacgctgcagacgtgcacggaagctgctttggccaggggtttggaggttaactagcaaacgcagcgtgagtcacggcggcactaggaactgaaaccgtgttagccatgcccaggtttaccctccgatgcggacg

SEQ ID NO: 2264 - DNA, 214 bp, Homo sapiens
gtggtgcggttacgaaaggaatcagcggaacccagatcaggccgctgctggggcaggcggattcagcgagatttttcctgggtctccagtgccgcttcagacaatgaaatcagcgtgtccgatcatcaattctcatcatgatcgtgacgtcacaaaagacagcggccaatgggagcctgcgatcagctcaggacagtccctggcctcagcccag

SEQ ID NO: 2265 - DNA, 135 bp, Homo sapiens
tccagtccactgtggctgtggggaggaggagggagtgcttggggttgctcgtatatcctagaacccgcacgtttcctgagcttttgttatgtatacacggaggcggagggtgtcacttactgtacttgacgcttt

SEQ ID NO: 2266 - DNA, 144 bp, Homo sapiens
gcgcgacgtcaatgccgcactgaggtgtgcctggcttcgatctaccctaggaagggtctgccctggggcgccccattccgcgactgtccccagtgggaaccacgccctccatctaccagagccatttctgcaacgtctagcacc

SEQ ID NO: 2267 - DNA, 249 bp, Homo sapiens
ggccacgccggcccggctccggggcccccagccttccggcgcctacgcccccgtcaggtcccctccgcgggctccgggccgctttgctgtggtcaggataggcgaccggtccgtgtcacttctcccgacccaacatggcggcggggtccggggcggattcccgggggcggtgcaggccgagggggcgtgaggaggaggtgcttccctgcccggagagcaggcccgcggcgtcccttcccacccgcgaac

SEQ ID NO: 2268 - DNA, 146 bp, Homo sapiens
agagccctcctaggcaccgacgccgtccctcttagccactgaatctccggtgatccgccagtcccctgcgggacgcgtcggggaccctcttgatcggatgcccggatctctgtagtctctccacccttcatcttccaactcccagc

SEQ ID NO: 2269 - DNA, 246 bp, Homo sapiens
gtgggactttcctgacctcgcggacacaggggcggggccgccgagggggactggctgcgggaggggtttaggcttccgcccccagcccggaacctttcttctccggccctggcaggttccgggagcctcggctcgtgggtgccggaagtggaggcggttggtggggttggcggggctcagcgacgctgcgcgggtggcggtttgcgaactgcgggtggactgtgtagtgaccggcgtcccgctgtc

SEQ ID NO: 2270 - DNA, 549 bp, Homo sapiens
aatactgattggctattacgcgcataacgtgagatcaaaaggagttcctacaaagacccttaaatcctccagacttcttaagcttaggaaagatttttgcttggttttcggttttctttttcttattttgagcagcagaccagcgtgactccacagtttcaaagagcaagcgtctatatttgtgtgacccggggccgagctggggaaggggaagcagagcagcgctgacgcagtcaggtccctggtgcaggtgccagctccccacagcgcgccgaactccccagtatgagcgaacctcaagtcactgccctcgcgcttgtcgagcgaactctcaaggcttgcaggtcgtctccaggagtcagagaggtccggactccggggattcctgctccgcggagaactggggagcccccgttcctgtgccactctcaggtggggtgactttgggctctgggaaggagagctgtgtccgtgtcacgagggggccccggcaggtggcgagcagcaccgaagcgcgggccaggacgctcgtttctcggcgccctctcc

SEQ ID NO: 2271 - DNA, 176 bp, Homo sapiens
ctgagtgacagaagaagcgatctcacagtgctgagtgcagccggatgaacaggttccagacccggcccctggcagggcgggcttcctccctgcgttgtgacccgacccgtcccgggaaacgtttgccttaaagcggaatttcctacctgtacgcagtgggccctttttgcttcttc

SEQ ID NO: 2272 - DNA, 92 bp, Homo sapiens
gccggtgggcgccgcgataaccactggaaaaaggaaaggagtcaggaagtaaagtgcacctcccactcccggaaaatggcggcccccgcaca

SEQ ID NO: 2273 - DNA, 156 bp, Homo sapiens
tcacacggctcaagtcaccaccgtgaacaagggtgggtgaatgccttttcttccccctgaatgtctttccttccgcggtattttctgccccgatctatagtcccttgagtctccacacacactcctcacagagatctgtagcgtaggtacgtgaca

SEQ ID NO: 2274 - DNA, 144 bp, Homo sapiens
ccccgcgtcccgcgcccgaagctcgggacccccgctctggcgaaacgaggaatatgacatacagcaaaacaccccttcgcggccgctgcactgccgcgacacacccggcgcctgcctctacagcaagccggcgaggggctggga

SEQ ID NO: 2275 - DNA, 681 bp, Homo sapiens
gacccctggaccccaggcgaggccaccagcgcccaccatccaaagggcgacagggaggcgtccccccaaccccggcggcgatgcctcctgagtcctaaccacacgccgtggacccccgcaccctcagtagccccgcgccgagtgtaaccgcgccccgtgtcctgggatcccgcggcccgggtaaccaggtcccatgtaaccgcagcctggtgaagccgtgcgccctgggcgcggctacttggccctcacggcagggcggagatgcgaggccccagggttcggccccgcagcgccgctgagtccaaggaccgagctgggagtgggggcggagccaagaaggggcgcccctgcgcccacaagccgcagcgcccaggaatcccctgggcgcctccgcgtcccccgcgggctgtcccggcaggcaggcagcccaccccagggctcccctcgtggaaggacacccctgctgaccctggccctggttctggcggtgtctccactcagccctcggagggacgcccacctcccgcggagctgggggactgtggcttcctcctgcgcggggaggtcggtgggcgccgtggacccgtcccgcccctgtctgaggagccgagtcggccacagaggggcagcagactagggagggctgatgggccgtgcacttagctccctccgggctgctgg

SEQ ID NO: 2276 - DNA, 138 bp, Homo sapiens
ctcccacctcccccaaggtgacatcaggtccgcgtgggaaacactgccctaaacgagcaggaagtagcactcggcacgcccaggcccagggtcctcttcggtgaggggcggctgtaaacacctggaggaagggtgggc

SEQ ID NO: 2277 - DNA, 178 bp, Homo sapiens
ggcagcgcggcacggggcgagcgtctccccgccgcagagcccgccgcgcgggggagctcggccgccgcaccgcctcccgcgcctccgccccgccgcccgctgccgcgactgccaaagtttctcggtcacgtgctggcccccggcggcccaaaggtcagcgtggagtgattgaggccac

SEQ ID NO: 2278 - DNA, 136 bp, Homo sapiens
ggactagctaacaggaagtaaagagaactttaaataacagaggaatagcagatataaggagcagcccctacccgtgggccgtgggtctgatagagcacccaaacacatgcttctctctgctccagaccttgctgga

SEQ ID NO: 2279 - DNA, 145 bp, Homo sapiens
tagattggattggtgctaaggcagtttgagcttgaggttgtccagaatcctttctgctaacgaatgccaactacaaggggaatccctgcctcaccgtttgcatatagatttaggaggaaatgcagatttgctcatttggtttctg

SEQ ID NO: 2280 - DNA, 137 bp, Homo sapiens
tatcgaggcgtattcgtgcaggtcgggcagatcctcacagcggaaaaccggcagcggcttcgaggcgtctagcgcccgcgcccgaaacgacagtttactcatctcaggcgcagcagatacctctccgctctggggaa

SEQ ID NO: 2281 - DNA, 151 bp, Homo sapiens
cccgccctgcccttctcgttccgcccctgcccgggagccccgcgtcctcattggcgagctccagggtggcccggcccggacaccccagtgataaaatagatcatctacacggaaactggcgcgctccaggggtggggcccaaactcagttc

SEQ ID NO: 2282 - DNA, 146 bp, Homo sapiens
cgcctatttcattgttctgcctggctctgacatggacttttcatctctctcctctctccccacctagccccgtgcattccgattccacagcccccccaaaatcggaggctcgcggagaataaaggagcgtggggtgggcgcggaaa

SEQ ID NO: 2283 - DNA, 140 bp, Homo sapiens
cactgcgaggaatgacgcgacgctcgatggtagtgaggctcggaggactgggagcgagaggccggaagcccctgctcgccaaacccagaggtggttggcagaaggtcccacaccttggctccctccttttagctaaccga

SEQ ID NO: 2284 - DNA, 492 bp, Homo sapiens
gtcggaaagacgatggcacccgacccccctaccctcgctagggtaaggacaaccgcggggtttgaacggcagagaaggcggtggagccagcgtagcgcccgcagagcaacgcaaagaggaagaacagagaaacggctatgagaaaaagggccgaagagtgagaagcagagggccttacccgagggggcggcaaccgggggccccacggtctccggccgcgcccgcgctggccgctgatagcgggctcacaacgatgacgtagcgaggagcggaaaacgcggtaaccaaggcggccccaggcgcgcacttccgcccggccttccaccggtccaggtctgcccctccgcagcgatagttcacgctctcggcggggctgtaccggaagttgcctctacttccgcccgttccggggcggggcttacttcgcagcgactacttgccgcacttccgggctgccaggcagctgctgtggctccaggatgatggagacag

SEQ ID NO: 2285 - DNA, 153 bp, Homo sapiens
actcggggggcgagggcagcagcgggggcgcccggaggcggggcagcggtgggggcagcatgagcaagacctgcacctacgaaggctgcagcgagaccacgagccaggtggccaagcagcgcaaaccgtggatgtgcaagaaacaccgcaaca

SEQ ID NO: 2286 - DNA, 147 bp, Homo sapiens
attaccctcgtttagcattaaaattcatttagataaaattgccacaaacatttaaatgggaagattagttccccctcacgccttattgcactcgctcaatggttccgttaagaacattttacacgttggaaattccgtcttctcaga

SEQ ID NO: 2287 - DNA, 143 bp, Homo sapiens
gaatccaagcccctgatgttccattctgtgtatcttgcacccatcatgttacttcgcttcccaacagagtcagaaattaaatctggccaaagacgtttacttccttctttgacactcagtgtctctttgacactcagtatgag

SEQ ID NO: 2288 - DNA, 250 bp, Homo sapiens
tctggctgtttctgtggttacctttcttcggggatgtttggggcgggaggtgggtgtgtgtgtatatttgctcttctgaagccgtttttccggagctcctggtgggggtgggggtgctctgtccctggttcctctcgaggcaggtgcaggggatggaggatgcccccctccccgagagccaggaggcgccgaccctgggcaggaggtgccagaccggcgcctctcccgcgtggagctcgaagaccacaga

SEQ ID NO: 2289 - DNA, 132 bp, Homo sapiens
taccccaggaacagctgtaccctcgactgaaaaacagcccgtcctcaggcgaatagtcatcaagcagggaactgcctgctgtaccatgtgaccagtggcgtggatttaagagacagaaggccagagtcagga

SEQ ID NO: 2290 - DNA, 209 bp, Homo sapiens
gggaaaaacacaggggtcggtgacgagcagagatactcaccatgtccgcgacgtggcggtgacacgggcgctgacgcctgcccaaaagttccgggggccggccctgaagtggtgtcaccgcacggcccaggggcggggcccgggcggaccaactacaactcccgacatgctcggcggcatgacgtcacggagcgtaccacaccgcagtc

SEQ ID NO: 2291 - DNA, 139 bp, Homo sapiens
cagctcttaaaggtggcgcatccggagttgttttttcctcctggtgggttcatggtcttgctgacttcaggagtaaagctgcagacacagaccttcacagtgagcgttacagcatataaaggtagtgcggacccaaaga

SEQ ID NO: 2292 - DNA, 136 bp, Homo sapiens
caacaccgagccactgagctccagcggccgaatggacaggcccccagcagggaggcgctgtgcgagacccgcccctctgtccgtggacacaggtctccaaccctccgacgctctccctgatttctgcatcaccgat

SEQ ID NO: 2293 - DNA, 209 bp, Homo sapiens
tagctacattatcccatccattatcgccacaagatggcgatagcgcttctcaactcgcctgcgggacggaggcagggtgcggcccggagaactcctccctgttccaacagcagctctccagcccgcagcgcttcctgacgttccgttagttcagtctcctgaacttctctgcatgtagattcctctcagggtagccctttgttgaccaa

SEQ ID NO: 2294 - DNA, 291 bp, Homo sapiens
atcttaaataggacagaaatcataggcaggtaattgtgttaattactaccgctggcctttggctgatatttccgggcagtcagaggaagaaggaaatcggctgaatcccgcagtaccgcactttaatcgacctccaggtagtcatttacagtcatctgcagagaccaacttttccctggaccaaaacctgcagggcacttggatcgcgtgggctttcatacgagagtcaacaacagcctacacggaacaactaaggaaacagacatacatcaatatgacccttcgcaaagt

SEQ ID NO: 2295 - DNA, 350 bp, Homo sapiens
gtcaagctctggacatggaagtcacaagcctggcaccggattcggggcatggccgggagccagggcagagctcgtcgttgccaaactcagagtcagcccatcccccgccacccagagcgcgtcggcgctaggacctagcgactgccttcgacccagagggcgccggcagaggcacgcatgcgcgctgttccggcaggggttgtcgtggcgcagggggcgggaccagaggcggtcacgtgaggggctctgggctaccgggtcacgtgaccgaggcacagatcagctgatgccggagggtttgaagccgcgccgcgagggagcgaggtcgcagtgacagcggcgggcgatcg

SEQ ID NO: 2296 - DNA, 144 bp, Homo sapiens
gcacacagaaagacattttccagttatcttgcacacaagtgggcggcgggacccgttttggccgggaacgttgtcaggaacgctgtacaccacttccaggcggtcacgtccgagctgcccaggcagtccttctgcgccctctgc

SEQ ID NO: 2297 - DNA, 252 bp, Homo sapiens
tgagccctggattttttcctacccggcagcacctcgtctggctcccccggcccgcagcagaggcggcgccgcgcggaacgccagcacctgagccggtgcctcccgccaggctcggcctccgtaggcccccggcccggcccaccgctccggctgaggcgggactgccccacggacgccgccacgtcatccccacgcccgccccgctacagccctgggactgaccccggccgtcgcccggctaccctcgcacgg

SEQ ID NO: 2298 - DNA, 154 bp, Homo sapiens
gcgtacgactcagggaaagccctggccgcgagctttttcaccaggcttgagctcagcagccgggcccgcagtgttgccgccagtggggaggcagggaggctgtcggcgcgccggagccaggcgggaaagggactacagccgcccgccgttgtag

SEQ ID NO: 2299 - DNA, 209 bp, Homo sapiens
tgcaagtcaccgcgtcacggagaaactacaatccccagaatgcttcgcggcgcggggctcgtgctccgcaaatcccggcctgcgtcattggagtctctttcactagagtcgttcattcattccgcacgcattcattgaaccggcgacctgggccaggctccttcccaggctccggcatggagcagtgaccaagatcaagtggctccctg

SEQ ID NO: 2300 - DNA, 38 bp, Homo sapiens
acgactcctcctcagcagcaccggaggaaattattgaa

SEQ ID NO: 2301 - DNA, 146 bp, Homo sapiens
acttggagatacctcaagccttataccaggaggcagcaccctgattcagtcaagaaaaaacgcagatcgctctgccaggggatggcataccgtggccacagacactcttattggttcaaaggatgctcaatatgaagaaaaaggtg

SEQ ID NO: 2302 - DNA, 138 bp, Homo sapiens
gaggaaacgctgaagacatatctagaacaaaggctcccggaaagacctctctcgtgaggagattgggagccttcttcccgccagggaactggcggttcgccgcctcaacccgtcttaaggcacagaaaatcataaaaa

SEQ ID NO: 2303 - DNA, 143 bp, Homo sapiens
agccgccagggacatgtctaacctcggaggccgtaggaacgggcctgtcgaagtgcgcctgacaggtgaagggggcgcggcgggccgggctgggcagccgcgaggtgggcgagctggcaggggtgcttgtggccttgggaagg

SEQ ID NO: 2304 - DNA, 149 bp, Homo sapiens
acaaacaacgatttttaatttaagaacccaggaaaaaatgttaacaattctcacattcagatttcttatcaaaagtcaacgtgaaatataactaatttatcgcaagcaattttatcagaaacttttcattatctcttcctccataagaa

SEQ ID NO: 2305 - DNA, 229 bp, Homo sapiens
gtcaccagtcttggaggaatgtcctcagtcccctttgccccagacaccaccagagatgcggcaacagaactctgaggcgcgccccggcttccaagtagctgggggcggggccgcgcctggaggtgagcagcaggcggtgggcggggccgcgctccgtccgaggtgagagcgaggccgggtgcgaggccacaccccgaggtacgagagctgagggcgtggccacacccca

SEQ ID NO: 2306 - DNA, 140 bp, Homo sapiens
ggcaggtgagcggctagggtcctgcaggggtctgcgcggtgcgggggaggtcgccgagtcagtcagtgccgaaaggaccgcgaactccaggggccaacaatcaccgggtacggaactcaacgtttccgccagttcctgga

SEQ ID NO: 2307 - DNA, 219 bp, Homo sapiens
gggtggggacagtgtgactgccaacccccgtgttccatgggaacagggtgttgcatccccggagggtgggcatggggaagaggggtgcgggagtgcagcagggctcacttacccgggtagcccacggaggggtgcagcaagtccatacccgaagtggtcagactcagcccattgactgcgtaaggcggttgcttaagataagacatcatgctaaggttg

SEQ ID NO: 2308 - DNA, 223 bp, Homo sapiens
cagctgatgaccagcacctcgctgcgctgcgacagcacgtagggcgcggagggcgtgtgatagtagcagctgtaggtgccgggggcgcgggcgcccagcagcgtgaagtcggcccagggctgcgcggagtggcggtactgcagcggggccgccacgccctcgcggtacagcacgaagctcatgttccgcaggcggcccgcgcagcgcaggctcacgttggcgc

SEQ ID NO: 2309 - DNA, 134 bp, Homo sapiens
gccaccgaggggccaggagggcctgtgggccgcgggcaggaccggcccgccacagagcccctgcccacgtcccgttccgggctcagacccgacaagtgggagcgagatcaacatctggccccgccgcggggaca

SEQ ID NO: 2310 - DNA, 96 bp, Homo sapiens
ggggggggaagcgagaagccgcatcaaccatgtaagcagcttcgcttcctgccgcaaccgtccgcggcctgaggagcccaccgccgctctcggggg

SEQ ID NO: 2311 - DNA, 144 bp, Homo sapiens
ccgctctgctgatcagccctaagagccgcggcggttgtcggctggggcggggcactccacgactttcccggccagacacggtcgccttcctaggtgtcttggcctgcgaggcactcgtagcccgcccctctcctaggtgacgta

SEQ ID NO: 2312 - DNA, 164 bp, Homo sapiens
tttggagcgcctgcctcctcttccctcgttgctcgcagccaaggcagccgcgaagctgggggcctcgggtgaatgctttcgccctctggccggcgaccaggagacctgcgcacactggccgccgagtgaccccagctcgagcctgcagccacaccagcgggacg

SEQ ID NO: 2313 - DNA, 160 bp, Homo sapiens
tttgctctaggtccatactactgactttcccggtaactattccggttatgatgatgcctgggaccaggaccgcttcgagaaggtaagtggggccggagttgtctggggagggttatgaaggccagaccttgtggtctgagcagcctgtgtctgtctcaga

SEQ ID NO: 2314 - DNA, 144 bp, Homo sapiens
acagacgccactgggagcttgggagagtgggacgtggacaggaacgtaaagaccgaagggtgggtttcgaaggagcggatttcgaagttgcaccggttgaggatggctgacattctctctcagtcagagaccctggcgtcgcaa

SEQ ID NO: 2315 - DNA, 208 bp, Homo sapiens
gccccccggggctgcggcggggacgcttctctggagggtgtggcggaaacttgaggcttggagtccgcgggaccggaaggggctccgtagctcggggcagggtgggcgcgagagagcctagaagcccatgtagccgcgaatcccgcagccccagtacacctccctccgtgcctccccgccttttctgcagagctccgccctggagtga

SEQ ID NO: 2316 - DNA, 277 bp, Homo sapiens
gggaagcacgaagctaaaattgaaattacagtcttccccaaagctacgcagagcgtggtggtagcggctctgcatcccacgcaggtgagtgcgggcttcacctttaattctgctctgcaggcgcttccgcgctcttcacctggtgtgtacagggcatttggggcctttagagggcgcacttgcggccagcaggctgaagaggctgccgcggagaaggctggggagcggagctgagctgagctggtgcagacagcataggagaaaaacagaaccgaaa

SEQ ID NO: 2317 - DNA, 160 bp, Homo sapiens
aggttgagagaacgggaaggagggggaagctgtgggcgcccagggcgtgacaggcgcaggtgagaaagtgagtttcgcgggagcatctgccgggaccgcagacaggtggagaaacgcagtcccaccgcggcccaccgcggctcccgggcggcctgggctg

SEQ ID NO: 2318 - DNA, 517 bp, Homo sapiens
ctccgtctctctcggttctattccaatctgctcatctcccctcccgtccccgctttccccaaggacctactgagatttcgatcccacaacttagtgggtcccatctcacccaggccccgcaatcctcgccttctacttgtcagcgttgtactacactctgagcaggcacccctgtgctactcacggaagcgggaccattaggtcggccattcctcctcaccccacgacacgcacccactgggtcgggccgcctccttgcagggagtctcaaggatgggctggcgtcagggaggggcccagggggcgctttcccaacactggtcgcagtcattgttggtataacggctagagacgcccagtgagttagcatggagggcagtgggaccggaaaaagacgtggaaaagctgcgaaaacgagccttcgaatcatggacgcgcgggcccagctcctcctccgagttcctcatccggggccgtcactcacatccggggccctcactcacatccgggaccctca

SEQ ID NO: 2319 - DNA, 155 bp, Homo sapiens
ggtttagggtaaaggggcgctccgctctctccgcgcgccccctgcagccctggacgcagcacctccgtttgggacgccctacgcccaccttaacttgaggctcccatccacgcagcctctgcaagcctcaccgcaaccgtgctaggcgcgtcggg

SEQ ID NO: 2320 - DNA, 138 bp, Homo sapiens
cacgagcccgccccggcgtccgagccctgcaggcgaggccaggcttggcgcggagggacctcagcgtccggggagcgctcgctgtctttgagttcctgctgccagagccgggcctcctctgctctccgcagcctcgca

SEQ ID NO: 2321 - DNA, 149 bp, Homo sapiens
ccagcctccgcagcgccatctctgcagcccagtctctgcagccccgcccccgcagccccacctccgaacccacagccccgcctccgactctgcaaccccgccccgcaggcctgccggcaggtgcctaacagtgacctcgccgtgctgca

SEQ ID NO: 2322 - DNA, 315 bp, Homo sapiens
gagctgacaccagtgacaaggactcacggtactaggaaagcctccccatgtgcttttccctgcatcagaatgctttcatttcagtgctgaataaaaacgagatgtcatgggggaaagaggaagttagctgtgtgtatttgtcatccctgttgtgatgttctttgcagctttttcttcttctagagtctccctttggtctgatttgcataggcaagtatacactttcttttcaccgaaagtgtgtggcttcctccttgggcttgtcaggaacatcccgtccaccaaccacatctttgctttgtagcatgttctctc

SEQ ID NO: 2323 - DNA, 254 bp, Homo sapiens
tgccacgtggcctggtccggctctcagctgcgcctgccgcggccactgccagccgtgccgggggagctgaccgaggccacgcccaacaggtaccgccccgaagcttccccgcgtccgcccgaggcgcttaccccctcccggagccgctgccacccaaatcgggaggctgagcggggagcgctggccggaaggcccagctgcgccgcctccagcagctgtgtggccttgagccagccactctgcctttcagagcc

SEQ ID NO: 2324 - DNA, 153 bp, Homo sapiens
tcctccgtccatctttaactgctggtgttttcaaccctttcccctctgtgccatgtttctagcttttatttaaaacgtactttggttttccttggcaaaattgtgtctagctactaggatgacgtgtcttaatttttttttaaatgttggcgc

SEQ ID NO: 2325 - DNA, 289 bp, Homo sapiens
gacccggctcacctgggcgtaagcaggtcagggtgatgtggcgggctgaggccagggatgtggacagcttgacgggcggcgaggccgctggcgcttataccgacctggctcctgtaacgcgtgcgggaagtttcatcatgcctgcgaggaccaaccagcgcgcacaggggcggggccgcggggtgtccggggcggagcaggactaagtggggcggcggaagggcgcaaggaggagctcttttgtttccagcgccttgcgtctcagtgcgcctgtttaaggatagcctca

SEQ ID NO: 2326 - DNA, 353 bp, Homo sapiens
gtccgctcggcagtctcgtccccgccgccgtcggcgtgagcctccacgggcaccacggtgaagttggtgggcatggccgcctgcagccgacagtccccgtcccggcccggcccgcgctgcgccgctcccgccgacgccacgggacttggaggcaggggcggggtccgaccgagccgccccgccccgcccgggccacgtgacttcacctgcttgccccgcggccccacgaaaagttggcccgcggcgacttcctgcagggaccccaacccaggctgcgtctgtctgaccgccgcgacccgggacgcggggctttcgctgcctgcgctcccgaccatcgcagagcccgcgaatcc

SEQ ID NO: 2327 - DNA, 208 bp, Homo sapiens
ttacctgccctgcgcaccccccgcgagccccggggcccttagctgacgaccgccctcacctcttctctcttcgcctgccgcggccttttacaaacggggccaaactgttcgctgtaacgacaatcgttattggtcagagccgcccacgcgcggcaagtggccgcccacctgagctcgcgttgtcttatgggagttttagttctctcct

SEQ ID NO: 2328 - DNA, 260 bp, Homo sapiens
tccttgcccgccgggccaggggagtgggctctagaaggatgacctttcaactgcgacctgctgaggaggagtcggcaagggtggccgccgaccagttctctttcccgcccacctccccaaatcccaggagaagaggggcggacgggaagcgacagtggccgcgagtccccggcacgcgacgggctctcaacctggcacgccgaatcctcaggacagccccgctatcacgcaactactcgggtgtcccaagagtcgccagg

SEQ ID NO: 2329 - DNA, 147 bp, Homo sapiens
aaatcttatcagcgattattcaggtactcaactacacagtacaggctccaggtggttttataagtccacgaggaacgaaagaaaaaaacatcgcaactcaacgtacacaaaccccaggcttcggttcccacataacatcaccttggt

SEQ ID NO: 2330 - DNA, 243 bp, Homo sapiens
gaggtggtgaagatgggaggggtaaatcgtgagaaaacgcctgtctatgaggaagacatttgagttgaagaatatacggggaccacagagatctggaacaagctgagggaactcaaaccaagcaaacaggaaatgagaacaaaggcgtattctaggaagtaaaagaaggctggttagctaaaagatggcaaggaaggagcaaaaccggaggagatgaggaagagaggtggtcagaatctgtta

SEQ ID NO: 2331 - DNA, 139 bp, Homo sapiens
ccctcgcggaggtggtgtaattcccccaaaatgggctctgccgcaggagaggctggctccagcgccgggggcttcggaaggagtttctgccacccccactgccgccactgaccgccccgacgccacggccggggccggg

SEQ ID NO: 2332 - DNA, 142 bp, Homo sapiens
atcgagtgggtgcacagtttccaggctccgactattactggcctcgaaggtacaggctcaggcggctcagggccccggcgcagatctgtcggcccgcgggatccccggagtctgagtggggagcactatccgcaccccgtag

SEQ ID NO: 2333 - DNA, 135 bp, Homo sapiens
cacacacacacacacacacccgctgttacggcccccactgcagaccccagatcccgccagtccccggactcctcccggcgccccaggtttccacggccgcctgcagctcctcggctgaggctgcgcttcgtaggg

SEQ ID NO: 2334 - DNA, 133 bp, Homo sapiens
taaagctctaactagtcacaggaggagccaggctgcatgatcacgcacactctggacgtctaggttttccgacctaataagggggcaggtcgcgtcgttccctgcttaaattagagaccacctccacctgcca

SEQ ID NO: 2335 - DNA, 141 bp, Homo sapiens
ggcgatggtttctgttcctcagcaatagttccttgaggcatttttaaatgcacaaacgcatacccatcttaggtgttctcgagggacacggattccctaagcaaacgtccttagggtcctgagttcagcagcaaactttcg

SEQ ID NO: 2336 - DNA, 242 bp, Homo sapiens
ctcagcttgggaggaggcggacgcgagtagctcggcagggggactcgcttggctttcgtgccatccgtggacacagtcgcgcgggtaggtgaccgggttggatttcaaagtccagcaggaaatcctgccctctgggttgcacttcctggatgagcctctgacgtctcaagcagcattgttttaatgctttgatgaagctcagcacgctgccgaaatctcggcagtattttttcttttctttt

SEQ ID NO: 2337 - DNA, 143 bp, Homo sapiens
ttccttcagcatccacccctccgaatataccactgacaccggggcccaggcacaaccccactacacccctccttgtctcgaccccaaatcccagacttatccacgaatggccctggggccccaaacgaccacagttccttttc

SEQ ID NO: 2338 - DNA, 140 bp, Homo sapiens
tgaaggaccctgcctcgagaagagctgcctgacgccgttgcactgggccgaggatcgtgaagagccctttggcgaggccgaggcggccccttccccagcagcgcccggcctgccgaggctgcgctgggcctgacagccga

SEQ ID NO: 2339 - DNA, 148 bp, Homo sapiens
agctcagacaacgtccagcaggaggctgagaggggcgagcccacggggctggccgggagaggaccctcgagcgcgagcgagtggcctcgaggcagacgaggagcaacccccaaaccccgagccccaggccaccgagcgcaggaactgg

SEQ ID NO: 2340 - DNA, 210 bp, Homo sapiens
tcccgtttgctggctcttggaaccgcgaccactggagccttagcgggcgcagcagctggaacgggagtactgcgacgcagcccggagtcggccttgtaggggcgaaggtgcagggagatcgcggcgggcgcagtcttgagcgccggagcgcgtccctgcccttagcggggcttgccccagtcgcaggggcacatccagccgctgcggctg

SEQ ID NO: 2341 - DNA, 142 bp, Homo sapiens
acaagccctcccgctggaggcgcgatcattcactgccccctagtggaccagatgtgcatgagccaggatccgtgcttccgctttgatgtgggctctgagcaaatcagagctgcattttatttcagtaagttttcggcctctg

SEQ ID NO: 2342 - DNA, 182 bp, Homo sapiens
ggggcgtagccatggtcggcgggctccgcccggaggcggtccctccgggttcctcacccggatgggtgaggctttccgatcactcctaggggcggggcttctggcaactccctgtcgctccggtctgtcggctctgggtacctcgcgatctgactcggctcccttccatcggcccccagaat

SEQ ID NO: 2343 - DNA, 159 bp, Homo sapiens
ccccacccagctgcgaggagctcgcggttccccagaggggcgggcctgcgtccgggtaaccgtgcgcgacgtccacgagtttttaggacgaccagcccttcagcctctaggccccgacgcctgcgccatttaagccacatatccgcccgcccggccgcg

SEQ ID NO: 2344 - DNA, 137 bp, Homo sapiens
cctcagctctgaaacgaggcctcaaaacggcaaccgatgtggtagccgcgcaatcttccgaaacccaaaggctagagggcgtgcccagtggccaggtgcaggcggtggggcaagtaacggcttttggtagccccgcc

SEQ ID NO: 2345 - DNA, 143 bp, Homo sapiens
tgcgagcccgacgaggctccgggggccgaggaagtgtgccgagaatgcggcttctgctactgccgccgccatgccgaggcgcacaggcagaagttcctcagtcaccatctggccgaatacgtccacggctcccaggcctggac

SEQ ID NO: 2346 - DNA, 147 bp, Homo sapiens
ggcccgccagttggtgaagtctactgggtttggggcggtgccaggtgagtgggcggcttgtggagctagcgaggggcggggtcagctgtgacgtggcagttgcggaagtcaaccccgggcaagggcgtggccaagtggggcagggag

SEQ ID NO: 2347 - DNA, 159 bp, Homo sapiens
cagtctaaatagaaaaataccacaatgagaagattttaaaaaaatattgtgaaatatcctcatctctattgtttttagacgttggggtttcaaatctgcaaaggctgactgcggcgttgtcaggattgtcaatgttggacagcgtccactaggtggcag

SEQ ID NO: 2348 - DNA, 150 bp, Homo sapiens
cctctgccgggctgaggggaggtgagtgggagccacggcgcgggaggctgacgagctctggtggagcggggcaggaaatagtgaagtctccggcgtgagatctaaggacagcgccgcagtagtgagcggcactgagcacccgatttgcag

SEQ ID NO: 2349 - DNA, 297 bp, Homo sapiens
gagttacacaaataaggattgatttgatcgtttcaaaacaaggaggtcactgcaaaattcaacaaatgctcagtaatgccattttcttcgctgagagctcctcctctgccagcagtacatgtccctctctaagaaaaggactctcagaagtgggcagatcgtaagagctatgactgatgatgaagcaaagatgaaaatcgtcttcatgacttgcatgtgcagcagaggaaaccacaagttattccctgcaagccggaagcgggcggatgttttcatggccaaagccagcagtcccca

SEQ ID NO: 2350 - DNA, 280 bp, Homo sapiens
tcgatgcgtttttccccgaatcctttgcgggtccggcctccgatccctgtgtggctgtttggcgggtgggcgctgtgttcctctctcgtaaagccgtgcggtctgtgggccgccattcagaaactggatggacagcttcggcggtgggaagggaagggacatgctgcaggccaccctccggctagaaggagggagtacttgaggaacaaggtctgcgaaaattggctgtgctctgttctaaaacttggaatggcctcagtacctggggaatgtgtttaaa

SEQ ID NO: 2351 - DNA, 191 bp, Homo sapiens
tggatggccccgaggtccaaaaagaaagcgcccaacggctggacgcacaccccgccaggcctcctggaaacggtgccggtgctgcagagcccgcgaggtgtctgggagttgggcgagagctgcagacttggaggctcttatacctccgtgcaggcggaaagtttgggggcagcagtgtcattggcctgacg

SEQ ID NO: 2352 - DNA, 313 bp, Homo sapiens
agtatgcactccttaaatatttgcagaatttaagtgccacataagtgaccacgtgggcaacgccctcggggccttaagccgcgccatttttggggctaggattggttggaccctccgtcacgtgacatgcagtcgccggatcgcctttgagtctcgtgaggtacttttggtcccaggctccgcggacgaggtactgcgcaggcgtgggagggtctgcgcatgcgcagaagcactccgggcgtgctgccggcggcggtaggtggcgcgcgggtccggcgggcggttggcttgagcgggaccggagctgaggcag

SEQ ID NO: 2353 - DNA, 155 bp, Homo sapiens
cgacgggagcgcgggcgtgagaccgccatggcggcgggcggctgcctccctgctggctccctgcaggctccctgcagtcgccgggagagaaagaaacccggccaaggctcagccacagggttgagccttttagagcaggggttgggctttttacc

SEQ ID NO: 2354 - DNA, 158 bp, Homo sapiens
gttctagactgccttccgggaaaatctggatgcttgccgtttaaaagccaatgaagcccctccacgtccttggagccccgcaactgcatttctcaaagcctcaggaggatcctcctggctttcatcctgaacgcgagttaacttaagttcagaagcgg

SEQ ID NO: 2355 - DNA, 284 bp, Homo sapiens
aatttataaatagccatttccttttcaccgtgctggaggctggaagtccaccatcaaggtgtcagcagtgaggggggcctgttcctcacagatgggggcttcttgatgggtgctggctgactcagcacagatgggggctctgatgtggcaggggtggggtagagacgggaacgctctgcagaaggagcggaagggaggaaacagcttcctccagccttcttataaggttatcagccccgttccccttacgacggaatcacttccctggaggccccctcttacta

SEQ ID NO: 2356 - DNA, 352 bp, Homo sapiens
ggcgagggcggggaagtgtgagagagacttgcgagaggctctagggctgctgctcggctctccgtggggagggcgggaggaggggccgaagcaaagaaaactcgccgccccggcagcttgcaagcgtgccgcgaggccggagcgccgacggtggcgctaactactcctggcagcacgggaggaggcactgacgtcaagccccggactgggacccgagcctcagctgtcatttaaagagataggctgcagccgcggctcccgggctccgacgctagggggcggggccgagagccgagcctgcaagaggtgcagctccccgacccgcggggacaggcaggcagggagctcctaa

SEQ ID NO: 2357 - DNA, 162 bp, Homo sapiens
tcttctccaaaccgccctgcttaattcgggacacagcagcacctgtacattcctcccttcctcctcgctctttagccgcgtgctgctaatgcttgtgtgttttctattgttacatgctttccctcgttgatgtgcatttattgaatgcctcctgttgtcaaa

SEQ ID NO: 2358 - DNA, 199 bp, Homo sapiens
tccgcctcctgcacctgcagcgcccgccgccgaagacccgcggagtcggcggttccaacccagcgccgccgcacgccgggtgccttctcaggtcccacccggagcctcgacgctcttccttctgcgtcggagcattgtacccgcctccgctgctaccacgcagtccccagggcccaaaaccctcctcgcagctcgtccc

SEQ ID NO: 2359 - DNA, 219 bp, Homo sapiens
gagttgggatgctagtcagtacccccctgcacctagcccttgcccctccgtctggctttccccactcccgctccggcggagctaaggttaacattagacgaggctgtggctaccggaaagagcgcaggcgcagagcgcggaatgcgcctgcgcagagcgctgggcgacgtggccagtcggggcccggaagtggtccctgtagaaccactgtggcaccgc

SEQ ID NO: 2360 - DNA, 152 bp, Homo sapiens
gcacttcctcacccctcccttacatggaggcggccccagcgcccgtcctcgccctctccccggcgccaggcgccgccgcacgtctcccagctcacaagggcgcacctgcgcccgcccactgtgctctcgccgccccctcccgcgggacccgt

SEQ ID NO: 2361 - DNA, 138 bp, Homo sapiens
cgttctcgtcagtggagccttcttgggcttggggctctcctcgcgtccccggggtgtttgggacttggtcgggtcgcgtctcgcctggttttagggtctccggggctctgagctcgcccactcggcctccctgcaccc

SEQ ID NO: 2362 - DNA, 153 bp, Homo sapiens; identical to SEQ ID NO: 543

SEQ ID NO: 2363 - DNA, 132 bp, Homo sapiens
gagagggacgtgaccgggaccgtgtggtccgagggaccggccgctggaagagcgaagccgtttctctctaggctcggccgcccccaggcccagccctccccggcatacgcagcttcagcagccgtcctccct

SEQ ID NO: 2364 - DNA, 905 bp, Homo sapiens; identical to SEQ ID NO: 323

SEQ ID NO: 2365 - DNA, 142 bp, Homo sapiens
cctttaaatactgaaggcttcaaagtgatctttgaagaaaagccccgaccacatgctgtttctgtggtatctgtgttcctttcttccggccatgtccttaaccttggcaaaataaactgctaagttgattgagatctgtctc

SEQ ID NO: 2366 - DNA, 306 bp, Homo sapiens; identical to SEQ ID NO: 133

SEQ ID NO: 2367 - DNA, 1835 bp, Homo sapiens
ccacttgctctctcacttgtcctcgatccggggtgccagagttagccgggcctgaagccgtcgtcttcttaagaggagttcataatgggccgggagtacaccccctggtagtaggaggtatctgcggccaggggcgaggcgtccaggcccgttttgttcgtgaccgggcccatggccaagctgccaggcatgggggaaccgtagccggggtagtgcatcacctgttcgtaggccttgaggtccattttgtggggttggtggtggtggtggctgtggtggtgctgctgctccgaggacatgaggttgttgatggagaacgggtggttgaaggcgtagtggtgttccggcttcaggtgggcctcaggcggcaggcccgggtggtggggcgggcccagcaggtgggccgcggcctgctgctgctgcccgggagagggcgccggctctggggggctcagcgccgcagccggcgtccccttcagctctcccaggccccctcgcttgtgctcctggcacggggaggcgctcgagtgaggcgactcggtgcccgccggagtctcggaggccggcccggcggcctccccgagttgagcctgtgaggcctgggctccggcggccgccttcttgccgctgccggcggcgcctgcggcctccttcagcgccagctgcttctcgcacttgaagcgcttctggcggcgcaggtagcagccgttctcgaacatgttgcccgagtcagggtgcagggtccagaaggagcccttgccgggcttgtcgggcgagcggggcaccttcaggaaacagtcgttgaaggagagcgagtggcggatggagttctgccagcgctgctggttctgccggtagaaggggaagaggtccatgatccactggtagatctcgctcagcgtcagcatcttgttggggctctgctggatggccatggtgatgagcgagatgtacgagtagggcggctttgcgtgcgtgtagctgcgcctgtaggtcttggggtcgcgggcgcggctcaggcccgcctgcccgtacatggggctcatggagttcatgttggcgtagggggccaggccgcccatggccccggccgcctgccccccgagcgggctcaggctgggactcaagtgcggccccatgcccgccacgccggccgccccggccgagccgcccatgcccgccatggcgcccgcgccgggggacatccccgccagggacgggctcatgccagcgcccacgtacgacgacatgttcatggagcccgcgctcatgttgcccgagccgctgcccatggcggccgccgacatgctcatgtacgtgttcatgccgttcatccccaggccggcgttcatgttgctcacggaggagtagccctgcggacagagccccgggagggaggcgacagcgttagcaccgcggctggagggtgcccagacctcccacccaccgcccaggcctccgcgtccggggaggcctccggggagccctttcgtccccgatggcccagtctccggactccgagtctgtttcattcagggagagtcatgatcgatcgcccttgggaaggtggcgagcggattgctgcttgggcatgtggcccgttcctagcccttctccacctcgcccagattctagaacaggggtcccatggagtactcccaagccagcaccccaaatacattcccctaccccagagtctccccaaactctcccaccagcatactgagctggcgccgaggcccgaagtccccggacgccacctccggtcgcagcaagcaacctgcgggacaacgcgcggggcgcctcgggctgcctccagcgaagactgtcccggg

SEQ ID NO: 2368 - DNA, 127 bp, Homo sapiens
gagaggggttaataagcttccttcctgttgtccatgggtttctaaagcccagggtcaggccagtgttcgtctttcctccgtgaggacctaccctgagatttgcaactatcttagtcttcttttctct

SEQ ID NO: 2369 - DNA, 145 bp, Homo sapiens; identical to SEQ ID NO: 80

SEQ ID NO: 2370 - DNA, 190 bp, Homo sapiens
agacaggagatgcaccgcgggtgccggggttcggggagcacccgaggaccgcggcgaaaggagaggggtttccgagcccaccttgctcgccagctctctgctccggtcgatccgcgcccgcgtgagggattcgatccgagacataatcggacggggggaccagggaggacgcggcgcggaccccggcgtc

SEQ ID NO: 2371 - DNA, 140 bp, Homo sapiens
tccagcaatctgcctggctgctttaagcactccagatcctgctgaggagcgcgattcaaacttcacacagttcagacagcacagaaaaccggtaaccgatcagaagctaaaaataatcagatagagtgtaaccagcactc

SEQ ID NO: 2372 - DNA, 158 bp, Homo sapiens
ctttcattccgctctgtagcagagattttgaactgtggtttctttgcttttgtttctacgctggtagtggtttatgttttatttttaaaatcaatcccgaagcccgggtcttgtaccaatacggctttaactggctgtgcctttgtgcctgtctcacc

SEQ ID NO: 2373 - DNA, 1057 bp, Homo sapiens
ttcctcaggacaaattggccttccccacgtgaactcgcggcaggcagagaatctaggttgggaccctggactgcacccggtgctgggctcctggccttttccctctccgccctgctaaggctgctgtgccgagccctgggaccatccaacagggagaaaggccttgggacaaaaatgacactttctcaacatcacccactgttgaggttacaagaagcagagagtgtgagaacgtttccaaatgaaagtgggggaaggatcgcaaagaagcaagttagttagggctgtgcccagccagcgccagtgccaacgccgagccgcctctgcaggggaaaccgaagcagatgtggtgagataatacatccaaccctgagtgctactctaacctgccagaggcggagggttctcagtgagatgaaagcattacagatgcgttagatctaagggaggggcctgcagatgcgcagctggcagagaaaccagggaggggctgaactgtcagtcgcgaccaccagggatctgaatcagttcaccgacagccttggggacattcaccttgggctccacaacctgtcagaaatgcccccaagcccaaaggcgtcgagagaatggccaggttgtttcagattgacacatatcctaatgtacaagtcagcccacacaccccacgtgcactgagcgtctcttgttgttcaccccaaataaactctgccggaactggggcgggactcgcaggggcggagaaggggggagacgggcagagggcagaagtggatggtgagaagagccaatggaggggccccgtgagagtgagcaaggctgcacccctaaccgacgtcctggggctactgtacaaacaaagaaccacaggctgggaggctgaacaacagacctgcactctctcgcagctcggaggctgcaggtctgaaatcgaggggctgacagcgctggtttcctctggaggctgcgagggagaaaccgtcccctgcctctcccaggctctggggtgagcccttcctggcatcccgggctcattgtagatggatcactccaatct

SEQ ID NO: 2374 - DNA, 161 bp, Homo sapiens
gtcacgaagatcacacaagctccgatcaaatgtgcttctcgatcatcttttaggcaagagagcgcttggggtgcattttcggcccctcatctcccacccccagtcaagccaggcccctggactgacaggaaaggctggccggacgttggctcggacgggaa

SEQ ID NO: 2375 - DNA, 144 bp, Homo sapiens
cagaaggagctattttgagcaggtctgtggcggaagtgggtgttcccgggtctctgctgcccagctgtgcccgctgccgtcttggggtcccggggtgcgcgggttgggctgggtgagctcagaggcaccttgtcggcagccgag

SEQ ID NO: 2376 - DNA, 169 bp, Homo sapiens
catgggcaatgcttttctttttatctgcgttgcttccatgggtaacaatgaataggagtctctagggtgccctgcagagagtgcctgctttgctgttaaaagatgcctatcaggtagtggttaaaaccacagaccccggagccagctgctggattttaagctccagctc

SEQ ID NO: 2377 - DNA, 150 bp, Homo sapiens
ctggtgtcttttagaaagcagcgctcagtggctgagaactcctgggttccctgctgggcaagggttaggcgtacatttgccagggtgttaaaggaggaacgcagggttcaaatcccagctccacttaacctcccccacactgcggcgacg

SEQ ID NO: 2378 - DNA, 143 bp, Homo sapiens
ggccgcggccgatctaggggctgggggctggaggcgggggtgggggtctgagctgcgtcctgggctcgaggcgtcccccggggagtcgcctcttagcggtgcgtccgggctagcggcgaggggccgccccaagtcttcccacc

SEQ ID NO: 2379 - DNA, 186 bp, Homo sapiens
ggcagacgctgtttaaatggagaccaacggggtgagtcgttgttaccaggcagcggggtgtcaggtggaaggaaggatgtttcaggcagaggaaaaggcatttgagaaagcctagtggggcaaggggagcagtgcacattggcagaactcacgtggttcagcaggggagtgttcactgggtgaaga

SEQ ID NO: 2380 - DNA, 358 bp, Homo sapiens
cttcccctggcgcaaacaccggcaactctccggcgcgctggattaacagacgctcgcccctctcaactcccctaagcgaggtcgaagctcctccgcgcgtgccgcggcaccactcccgcctaacccaccctccggcaacactcgcccaccagctccccagtccaccggtctaaggaagacgtgcgcgcgccccgcacccgagccccggagctggggttctgcagggagggaaaggctgctccagggctccctcctccatctcactccaggccggctcgccgcccaccctgcctgcggatcccagtactcgctgggagccggccctgcgccttcctatcatgaagacaccatcctcgca

SEQ ID NO: 2381 - DNA, 138 bp, Homo sapiens
gcctggcgcggggccgggtccgcgccccggaccatgctgggcggggaggtcgtcccagcggcggatgtggggctccggggcccccctggtgggttcgcccgcgcctggctctttgttggcccccagtctctaaggatt

SEQ ID NO: 2382 - DNA, 410 bp, Homo sapiens
gcctccaatccccaagaagaaaccccaatccattccctcagtgtctccctggaccccttcggctggacctcggccctgcagaaccccccacttcgcgggacgctcgctcaccatgacgcgtgcgagaacgcggtgcactcacccaccggcctagggctccgggcactctgcggaaactcgaccaattagagcccgactctggtctgacgagcatcccgtccgaccaatcagtgtgtcttgagccggcaaatcaccagggacgaggaggccgctcgcgttgcatgccggaaattgtagttcagatacgctggttcggatcgatcaaagtgaagattgtgtctgggaggcctgcgtggccgacctctcttaaggcttagttttctctttcctacacttatctcaaaggtttg

SEQ ID NO: 2383 - DNA, 141 bp, Homo sapiens
gcgcggcccggggccgggaatgggccatactcaggttcgtggaggggtcgccgaggcccagttaggacaaggttgcgggcaggtctgaggcagccttgggtccggagcgcgctggcgagcggtccctcggcaggtgggaca

SEQ ID NO: 2384 - DNA, 191 bp, Homo sapiens
gcggccgcagcgcgggcagggaggacgccgcgggagcccgggttcgaggctgggctgtggggctgcgggggcgcacgggcgaggtaggcggggcgcggggcccccgcggcggcacaaagaggccggccgcggcagttttgaaaataccaaggaagttgatctgggccggggcccaagaagtgacgaggagg

SEQ ID NO: 2385 - DNA, 191 bp, Homo sapiens
ataaagacaggaagcagaagagcagccgacggaggctggggaaagaggggatggggagtgactgcctaatacagatgaggtttcttagtgcgtgatgaaaatgttctaaaactgactgtggtgatagtggcagaactgcaaatatactaaaaaccgctgaagcaagcaaacactttaaatgagtcaaccgc

SEQ ID NO: 2386 - DNA, 245 bp, Homo sapiens
tggagtttgtttattcttatttggccggcggtgatctcgccttgaagcctcagcccctcgggcggtcagtcgagccgctcccaaagctccgcccgatcaacctgctggcagcgccgcaccctgggccgccggcccaggagggagtcgggagggagcggccgaccgccctcctcgcaggacctggttcccgcggggccgcctccttggctgtcacaggactgggaaagagaaactgttagtgaccg

SEQ ID NO: 2387 - DNA, 138 bp, Homo sapiens
gggcgctgcccatggtgctgacggctgcgccggccgtgtatggctctgtccatggttctgaacccacagtcggcttcggagctctgtccgcggttctgaaattcagagccgctttggagctctgtccgcggttctgaa

SEQ ID NO: 2388 - DNA, 136 bp, Homo sapiens
caaacgcacccagaccgggggccaaggggagacgccggcgcgtgctgggaggggcatgagttacacccgcgacccttggaacttggaacggcttccccagccccggcggacgccggcccccaggccgtgccactgg

SEQ ID NO: 2389 - DNA, 1135 bp, Homo sapiens
gggagcccacacgcacggtggcgtcactgcgcctacaggcaacgctagagcacaggaggggtgggaggtcggggctcgagggcttcaccccgcagcagagctcagagcccaatccaggccttagggacccgcctggggcctagaacttggtgtggcagaggtagaaagggcctccgataatctgcttctacagttgagagacgtcaactggcacctctgagcctctgccccgtaggtgaaatgggaacacacgaaaccatctgaggagctctcactgtccgtcaccaccaaatgtggcccagactccgtggggagggacagtcccatcctggaactggggcttttaggacatcccagagcccggtaagagggacagggagaatggggcttggaagttggtagcctcacattcagtgtcccccgcacctccttccctttctgtaccctctggtggctcttgtggcctcagctgcccccagaccctgtctctctcgccctcccccaagctgaggtactgaggttgggctgtggcttgagctgcacctgtgccctgttagggagtgggggtcccaggcccatcgcgtttcttctcactgctggctccagctcaacacttggcaggcccccctccccaaactgctggagcaagctcgcgtagactcggcctggccgccgctcccgggctgccgagtggaccggccgtttcgccgcttcaaaggctgtctttgttttgctccagctcaagcttagagaaacttaagccaacaacctcagccgagggggcggggcggcgtctgctggttgttattgaggctgctgttaccattattgtggtaattgacgcagtgttcccagtcggtgacttttcatgaaaggaagtgtcacttccttcccatcacacccagggtgagtggggcgggcagcagaaagatggggagggagagaaggaaaggggtgtgtgcctccagcagacccttaaacttgagagctgtgtggccttgtactagtcactgcccctctctgggcaacaggggtctgtaagtccattgcgctcatcctgcacccaggaggctgatgtttccggagcacctgctgggcagcgaggtgccttggggagggagcaggacaggcaggc

SEQ ID NO: 2390 - DNA, 155 bp, Homo sapiens
caagattccctgcattattgcccataggcatgtgttttaccccatactccttctcccttttatcttgattttcgcggtgctggggagtctgcagggattccatggcgacgggctcactgggacaggggctggggttgtgcgtccctgaggcaagg

SEQ ID NO: 2391 - DNA, 137 bp, Homo sapiens
gagaaggaacgcaggacccctgaggcttgccaccatatcaaaccccaagtcaagaggtcaggtcgcacacttggtctctcgagttgcccgcttggccctcttccaagtgcacttccctttctttcattcctgctctg

SEQ ID NO: 2392 - DNA, 159 bp, Homo sapiens
agaggggtcctcctggccccaggccaggggacttccgaggagggtcccaaccggctcggagagagtgcaagagagcgcgagaggaggcggcaggggctgaggcagccaccgccactgccgccgcgcgacgaatttgttgtcatccgcgaggcgcgttcc

SEQ ID NO: 2393 - DNA, 268 bp, Homo sapiens
tcaagtggccaggaagtttggggacacgttgggagggccacctcaggcccgggagtcctgttgcctcttctcctgtgctgttacccagcagggggaccaggggcctgggagaggcgccagcactttactaacagcccagcgccttggggtttcgtttctgctgggttctggctcaccttcctcttgtggtcagaagaatgcagaatcctgtggtttccccgctgtgtcgtcacaaggcctgctgccagcctgccgcacttttcctcag

SEQ ID NO: 2394 - DNA, 146 bp, Homo sapiens
ttccgccgcgtttatggccgcgttaagtctgagtgccgctttgagttgttgaatgaagtgaacttcatttgtcagcgttcggtacgcagtctaggcagcgcccttcctgtacctctcttcctttcctgagtcgttggcgcagctga

SEQ ID NO: 2395 - DNA, 231 bp, Homo sapiens
agggtgctccctctgtgttctttccgccattcctgaactctggaactgggagaattgaaccaaaggatgattagagcaatgtggaattttgttcacagtgctttgatggattttctgtaacatttactttgcttaaatagcaagtcttaggagagggtgtggggagggaatggtctctgaagcacaagataaatcgtatcttccaaggatgtctccactgtgggcagagga

SEQ ID NO: 2396 - DNA, 206 bp, Homo sapiens
attaggctaatgtcaccgagcaaagaaagcatcaaagtggcgggtcgggccctaaacccacgatgggagataccacattcggccacaagagggcgcgtcacattttctccaagagaagctgggccgctgatgaaggacgggctccgggcctcccagagacacttcacctcctgggatcttgctctaaggaagcccggtgcgaagga

SEQ ID NO: 2397 - DNA, 154 bp, Homo sapiens
cagttctaagcccatgtggttgttgacagcattcagttccttgcagaatgtgaaactgtggacgtaagtttcttgctagctgttgactgacggcctccctcagttccttgccatgtgacttcctcaaaagggcagctcacaacattgcagcctg

SEQ ID NO: 2398 - DNA, 492 bp, Homo sapiens
cgcaaccttctcggcagtcacacctgtgtccccgatgccatctgcccacgtctgtgtgtgaagcaaaccccgctggcagacgggatggagagagatggctcctccaaaccagaattaggaggaaaaccccgctgagggcgtttcaaaaacccaacaggcgagcggggaaacctgcattgtcagacctgctgggccctgagttctagccccatgcaccgcgccgagctaattctcccggcgactctctgaggggttattaccacgtaataattgatgaggacactaagggctaagaggagtcaattaacttgtccctagttacagagttggaagtcagggatggatcttaactggtggggctgttccgagggcctgtgagagactgggtttcagcccagagcccaacacagcgccggtagagaaagtatcgggtacatttttgcctgctaatccggcggtaggaagtcaattacatctttgatgactcagatt

SEQ ID NO: 2399 - DNA, 534 bp, Homo sapiens
ggatttttgccgtcggagcacctcgtatccggcgcgcgggcccagtgtgggactgcggctgggagcccgggccctccgggagtgaagatacctttggaggtgagacggcctctctagcgcgttgacactgttgatggaagggattaaaggggtatcaggttattttaatttattgttgaagatgatgactgccccctccccgatccgcataccgtcctcactttcccaccccaaccctagacccgacaacaccgttcagccctttgccccgggcagcggaaatggttagcttcctctaggagtttctgctgaggaaggcgcaggcaaccctagtcggcttagagagagacaaccgcacgcgatcaccgagcacgatttctcccaacaaaaaaactaacaataatagcgatccacacactcaagaggtctcaaacctccgaagttttgccccgagtcttgtggccctggcagaggtgacaagggcatttgggaaagacagagaaaaataaattcgctccagtgactgtacacggg

SEQ ID NO: 2400 - DNA, 144 bp, Homo sapiens
cagtggagggagaaaggcagtgcccgctgccgagctccagagcctgcaggggcggacggcgttcactgggggcaccatcgagcctctccccaaacagcacaggccccgcccgtcacgtgcagcgcccgaggctcttggatggat

SEQ ID NO: 2401 - DNA, 152 bp, Homo sapiens
gcggggtgcagcctccaccccctccccatcccatggtgggctgctctgacctggcctgggtggggtgcggcgggtcgggttagcggggaagccgagtcctccggggcctggcatacccccacacccgacagccggcgagcaccctaaagggg

SEQ ID NO: 2402 - DNA, 136 bp, Homo sapiens; identical to SEQ ID NO: 530

SEQ ID NO: 2403 - DNA, 166 bp, Homo sapiens
tcctttttggtaaacaaatcagaggaaacttctgcccggccgtggctttccatcccccacctgccccaccccctgcaaacgccactgattaacttaaaacaaactcggctgcgtgtttgtgcgccgttgggtagcaggaggtagagcctaggcgagagcctggtgc

SEQ ID NO: 2404 - DNA, 157 bp, Homo sapiens
cgggtaactgattggttttcctggggcttgttctgcctggttttgcaacccctttgctttttggggtgaggagttggcggaaaggagaggggcccaagtagcacagagggcatttgcggggtgcgaggcagcatcaatctcaccggtgcttctttat

SEQ ID NO: 2405 - DNA, 141 bp, Homo sapiens
ccaccgcctctgggctgcgggcgagctcccccggcggcggcggtggcggcgggagcggcggctcgtcggcctgaggagcggattgctgcccgtcagtctcgccatccggcacagacgcttcagtggccgtgaccgggaggg

SEQ ID NO: 2406 - DNA, 245 bp, Homo sapiens; identical to SEQ ID NO: 107

SEQ ID NO: 2407 - DNA, 159 bp, Homo sapiens
ggcgctgcgctccctcacgggtccgggaggtgtcgcgcgcggccgccagcgagcccagccgctccccgaggcttgcgcgcctgcgccggagcctcctgggtttctgcctctttaaacactttgaaatgcaattccacccgaaacgactggtagtaacat

SEQ ID NO: 2408 - DNA, 116 bp, Homo sapiens
gacatgtgggttattgtttttgcgagtgacctaaggccacttctcgggggagctgggggttgccttcccacgtctgcgcgtctgcaccccatgcccgggcctggaagtcagactcg

SEQ ID NO: 2409 - DNA, 153 bp, Homo sapiens
tgctgcttggttaggatgggaacgtggggtaccggcgagacggaaggcggcagagagatgtcggtgtgtcacacacgcacacacacgcccgggctggggacggcgaatggctccaagtgtgagcgggcgtgcgcggctgtcagtgtgcgtgtg

SEQ ID NO: 2410 - DNA, 314 bp, Homo sapiens
ttggccgggccagcccggggaggcccggcgggaccccggcccgcgtctcagctataaagatagccccggcatgacagccgcggcgaagctcttctagttcatctgctggccggctctcagtccccgtggcgccccctttcctcttgtcccagagcgctctcgactccaccatgccaaggggattcctggtgaagcgaactaaacggacaggcggcttgtaccgagttcgccttgcggagcgtgtcttccctctgctggggccccagggggcgccgcccttcttggaggaggctcccagcgcctccttgcccggc

SEQ ID NO: 2411 - DNA, 216 bp, Homo sapiens
ctcgtaaacaaacaattctcttctgcactcagcaccgtcatggacacacaacgcgggtgtcctgagatttgtggaccccggagatgcaaagacgatggcagcagcgttaacaactaattacagtagcggcgaccgcgccaaggctttccttcaaccctgattccgcagatatccggaaaactcttaccctccctcgatatgccgcccccatccgca

SEQ ID NO: 2412 - DNA, 148 bp, Homo sapiens
agctgggctccagcggaggcgcgcgaagcccgagggcgggtgcagctgatgcacctggctcactgcatgcacgtgtgcgcgggggtaggcgcgcgccgcggcggcccgtgctccgccagcgctcggacacggcccatccctccgagcc

SEQ ID NO: 2413 - DNA, 153 bp, Homo sapiens
ctcagcccgcttaattcccttccttctcatgcgtgtaattgctactttagtgagcgagcctaccagttgactaaatacgaaattttgctcagagttgtccgagcattactgtggacagattatttgagttctgtcatttgaacattttagttt

SEQ ID NO: 2414 - DNA, 152 bp, Homo sapiens
ccagaatgcggagaggccttcgaggaagcgcggaccaatcggaggccctatgtagggctgaagaggcgggactctggtcgccataacaactcatcacgcctgtgctgcgcgcgcgcgtcgccttagtgccgcagccctattacgtgaggtag

SEQ ID NO: 2415 - DNA, 144 bp, Homo sapiens
gttcggacgaacgctcccgcctactgtccggtcccggtccggcccggcgcggggcgctgtgggacttgtagttcgcgtcactctccgcagccgctccggagcagccaggggaactacagggcccaggaggcagcgcacaggccc

SEQ ID NO: 2416 - DNA, 220 bp, Homo sapiens
aaggtggacaagcagctgcagggaagccgtgagggaggcagctaaaagcagccgtctaagcagcactgccgagtcactccacagtgccaaccacacacccagtgccaaccacattctggccacggaagcggtttcactctcagactgagttgcaggggctcgcagctttgcaggtgttgtagacccacctgggccacgcccaagcctgtccctgggtttc

SEQ ID NO: 2417 - DNA, 348 bp, Homo sapiens
gggaggctgggcgaactcccggggaggagactgggtcagggacacctgcggaactcggcgtggccccgacccgccggcctcgggcgcggaggggtgggcaggttaagagagcaggaggagggacctgcgtcctggtccgggactggggtggccggggcagctgcgctcctagcaggcggggcgtggagtctggaggagcgaccgccccgtcctctcggctccccgggccccgccccggcggacgcgcgcctcgcgcccgggcaccagcgcgcgcaggggctgcggagcggcaggatgcaggaggagctggcgtgggagaccgacggccgtgagtctgcctggaggagg

SEQ ID NO: 2418 - DNA, 146 bp, Homo sapiens
ccgggcgggccggtgttactggtcctctgcggcctcctggaggcgtccggcggcggccgagcccttcctcaactcagcgatgacatccctttccgagtcaactggcccggcaccgagttctctctggtcagtgccctcactaaccc

SEQ ID NO: 2419 - DNA, 144 bp, Homo sapiens
cctcttcatcgtttctctctcagactccgctgacctctttccttgctgcctgtgcccggggcccctctccctggtgtcgcatctccttcggcccctgcgctggagccccctacgtcagtcatttcccttcattgccccgccggg

SEQ ID NO: 2420 - DNA, 870 bp, Homo sapiens
tgctggcctgttccatcaagcccagttcgcatttgctttagcctctgatttctctttcttctttggaaatttcattgagatgtctctgtacttcgcttgtcagttatctttgttccttttaaataaagggcttttaaatggacttattgctcccagcgtgggttcctctctctaaatgttagaaaattgtgccatctacccgctatgctgagtactgtcacactcggagacctcggggacctccgggcaggcttcaatgctgcagtgtcaggggccgcgggcagcaggaggagggggcggctcacgtggatttttacagatctccgcctgcagccggcccgcgtggccacgccagggcacggcccgagacgcgcgcagccgccagcttgatggcggccgcgaacttggctgcagcggcagatctccgaccaaatcgcaggcgtggccgggactcttcgcttctgcagcatacagctggccgagggggagccgcgggtggttttggaccccaacagcaactgggggtcagggataacggaggacaatgggaaagggggagctgcctaggagggggagaggggtggattttgccgcgccgctttggagcgctcccacggcctctccaggccggtctctttccttgggggatgccaggctaggggcagcggagagcgaaagccgcggagtggcttccctgtctcttggccagagagttctggccaggcagttcggctgcaactttcagatccattttctctggtggagatatttctggtgtctttttgtaggccagacttctttcctttaggggagagtggtttagatggaccgaatttgagcagatcaggtgtctgatgtggggtatcttca

SEQ ID NO: 2421 - DNA, 149 bp, Homo sapiens
gagcccgggtggcgggaagcgagcccaggttcccgcggccttgcgagggcacgcagggcaaacagtgctttatctttcgcagcggcgatgagctggtgacttttgggggtcatcctgagggacatagacgaaactggttgggaggtagt

SEQ ID NO: 2422 - DNA, 153 bp, Homo sapiens
aggcctgagaaagggaaacctaaggcgtcgaggtccaggagcgcaggccagggacggaggtggtgggggcggagacctcgtgcgctgaggcccggacccacggacacaggcgacagaagccaagacatcaggcggccgggagccgggacgccg

SEQ ID NO: 2423 - DNA, 176 bp, Homo sapiens
cgtcaccgccctcggcccgcacagagagccgcgtggcacgccgggaaatgaagtccacaaaagcctcagagtagaccgcgggaatgatgggcgggaatgacgggtcacgctgtacgtcgggaaatggagtccagggtaatctgtcagccgactgtacgacggggagccctgaagca

SEQ ID NO: 2424 - DNA, 134 bp, Homo sapiens
ggtcgcccgcccgcacgcccggagcggggaagcacgccgcctccctacgcaccagcatggcacctcgcacaagtagcgccgccaaagtttccccacgagggggctgagggacaaaagcccctcccgaaactcgc

SEQ ID NO: 2425 - DNA, 149 bp, Homo sapiens
ccaggtcaccgcaaggacacgagggcgcgggcagtggcaagcaggggccttacccacggcggggccgggggtccgggcggagtgcaggaggcctcgagggtcggcccgggtggttgcggccacagcgcagcggcggagagcggcgccca

SEQ ID NO: 2426 - DNA, 310 bp, Homo sapiens
atgtcactcactgtcttggctcatgcgtcgtaagcctttgttccccaacagggggaagtgaaccagcacacaaggcccttccgtcctgcggagctcactgccttcctcagctcctggcccgcacttccgaccacacactggggacacaccctcgggggggccccaccccagcagctgcccatgttcacacctcttcagttatttcaaactccgcctctctcggcctgatgcccaacacttccttcacccaaggaggtcctgttcaaatatcacttctggccaggcgcggtggctcaggtctataatccca

SEQ ID NO: 2427 - DNA, 143 bp, Homo sapiens
agttgggttggaaagaaggcacccagcgtctgcagcgaaggactcgcgtgggagcgagaaatgtccctgcccagtgccccgcgcgctggatcgcgggggcgagtctgagggtggagaggccgccgggtggaggcgcgcagggg

SEQ ID NO: 2428 - DNA, 277 bp, Homo sapiens
agagaggcaggagcccaggcagtacctgcagcgtccgggcaccagagccaccttggaacaggaacgcgtctccggccgcggggctgcggctccgccaaactttggggcgggcggggcgggctggggcgcccagggggctctgtagaccgagggcggccccctaaccatgatgtttcgcgaccaggtcggggtgctggcgggctggtttaagggctggaacgagtgcgagcagactgttgcgctgctgtcgctgctcaagcgcgtgagccagacccag

SEQ ID NO: 2429 - DNA, 146 bp, Homo sapiens
ctcctccactcgctggagctgccgcaagtccagacccaggatgcagtagtctgcgctctcaaagcacagcgcggacgcgggctcccccctctcgaaaggcccggttaacgcgcacagctctggcgtctctccaatcctttctgctt

SEQ ID NO: 2430 - DNA, 137 bp, Homo sapiens
cgtccccggccccaggagccagaggccgagctcaggacgcagaggcagcgagcgaacccctcctcggcgccgacgcgaagccccgagagaacagtgccccttgtcctccagcatagaacagtcgccttcgaattccc

SEQ ID NO: 2431 - DNA, 229 bp, Homo sapiens
ggggcagggctggtgagcaagcccgcggggagcgagcgcggaggcgggcgttgctacggcaacggtgggcggccagggagttgcctgagggaaaaggggcagacgtccctgggttccggtgttcgcggaggagtcgaggcacggagaggcttcgggggagggacggaaagaagggtggcccgccaggcgggcggggtccatggattcggggtgagggccgtccgcggcc

SEQ ID NO: 2432 - DNA, 143 bp, Homo sapiens
gggctgtttggttaccagggttacctctgtgggttccctctggcccggggccagcactgccctggtttctgtgatcacacttcattctcacgacccgtgggaggtgagcacagggactctgctctggcctgggaagtgggatg

SEQ ID NO: 2433 - DNA, 143 bp, Homo sapiens
agcagccgcagtgacccccactcccccatgcccaccccagggagacaaagcgaccacagctgggtgcggagctgcctccggcgtccaggataaccaaacatacgaaccggaccccagcccgcgccggcgtcttcccacactcg

SEQ ID NO: 2434 - DNA, 227 bp, Homo sapiens
cccggacacccaccctcggggacacgtatgtgcggggagcgcgcccggaaccgtcggggccgagcacggcgtctcacgccagagcagccgcggatcggagcatccgctggtccaggaccccccctcccgcccgccaggccacgttgttcgggcagctgtcacctccctcggccgccgcagcacctctcgcccccgcagcccggccgcgttcggatgggcgcagcaga

SEQ ID NO: 2435 - DNA, 179 bp, Homo sapiens
actggttgaatcaagtttgaaaaaacatacgtatctgcaggcaagctgtgggtctacacggtttactctggtcatgtgactactatttcagaagatccatgaggtcaaatgactcagcaaaattttgcaggccaaataacaggaaatccgaacttcaaaagcacactccattaccactg

SEQ ID NO: 2436 - DNA, 139 bp, Homo sapiens
attactaactgaatgtcctgttacctaaaaaaagatagaaataaagcccatctttagggcagaattcaactgccggacttgggactggacgccaccaagtggataaaatatggagctcggaaaagattggattcccggc

SEQ ID NO: 2437 - DNA, 411 bp, Homo sapiens
gtgacttctggagaaaactgcagacactcgtcattgatctttccacccgtaagtgcatcgtcttcttctttccagtggtttcagagcacagtgagcaaagaggacgccatgccggaagcactgaaaagtctcatattcccgaattttgaacctttgcacaaatttcatactaattttctcaaggaaattgagcaacgacttgccctgtggtgagtacatttctacttcccagctacgttcctccctccgtcttgcttgtgttatttttatgtcgtccctgggtaggcagcaggcaggaacaaagatgaaaggcaggaaactggcttacaacaagtcagccttcaaatgattttcagttaaatcctacatgcgttcagatctcatttgcagtttctttcctctggtttgcag

SEQ ID NO: 2438 - DNA, 313 bp, Homo sapiens
cctgccgggtgctgggggccacggagcccggagtagggccgggctgcttacctgttgctgctgcagacgtggcgtcgcgggcgccgcgtgcaggtccttcggggctcctcgcgctcgtcccggccgcctctcggggctcgggcggctgcgagctggcacggggcagcgggcgctgcgggcgcggcaggagcggggcacagcgtctgtgcccgcacgtccggccagcgcgccgcgctgcaagctctgagaggcagcgggggcgcgcggcgtcttaaggcagcgcggtgccctcaccttgcggtgccgccctccc

SEQ ID NO: 2439 - DNA, 135 bp, Homo sapiens
gagacagagtttaagaggtttagccacgctacggggctgctgggagcccggcagtctggccacaggaggtcggtttcacggaagggcaggatgtggcggcatctcctgaatttaaggagtcttgggggcgcggtg

SEQ ID NO: 2440 - DNA, 213 bp, Homo sapiens
tcccggccgggtccccacctcgggagcctcccacagccagcccagagaaagcagccacctgctagaacaccgcacttccgcctccctcgccaccaccccggaagcgctcgccgccgaccaggaagaagaacccgcctcgcagcgtcctcttctggcaccccagggtggccttgttgtctgtttcccggccgagtttgtgttttgctggctcgc

SEQ ID NO: 2441 - DNA, 348 bp, Homo sapiens
cccgcccagtacggtgcggccttggccgcggcgcgtacctttaaatagcccgtgaggtcggcagaaagggcgcctgcggttggcgcgccgctgcgcgaaggagccttctgattggttgcgctgggggtgccgcggcggccttccccaagggtcggcggggatgcttcttccgcctggtcctagtggcagcggattctttccgcccccaacgctcgcccgcgccccgcgtggcagaaaggagttcctcagctgctgtatctggtgggaaagcgaatgctttagcgaaaataacaggcatcccataaatacatagactagaaataagttttggtttcattaagagcccag

SEQ ID NO: 2442 - DNA, 149 bp, Homo sapiens
ataagaagctaaccacttggagtatcatatttgagaggtcagaaaagtccacagttaaagatcggtttataatttacgaagaaaatagaaagttttgtttctctgagttgaaatttgccaagcacggcgggaaatattgcaagtttttg

SEQ ID NO: 2443 - DNA, 171 bp, Homo sapiens
ccctcagattcctccgtggaagaactgtggctccaccagatcccaaaaagcaaggcccgtttcctacaacccccgaaggagggtcgtcctcactccgccgccaacctactagcaccatcaccagaccctcgagggcggtgccgtggacctctccagatctcaaaaggcaga

SEQ ID NO: 2444 - DNA, 150 bp, Homo sapiens
tgggaagggtttccagaaggtgggaaatgtcacctgattcacactgaacttttgaaagctccccacccccaaggagccgcgcacaccctcgctcgcggccgccctcccacagccccacacactgggagaccgcccaccgcaaaccgcgga

SEQ ID NO: 2445 - DNA, 167 bp, Homo sapiens
tcccctgtgaacctaacgaggccctcatggactgacggagctgcgagagaagcctggcctcaccccagacgcctctgagaggaggagcagtcatgggcagcgaccgattccattccagagcagtggaaattcgggaaggaagcccttccagcagctgtgctgtggga

SEQ ID NO: 2446 - DNA, 139 bp, Homo sapiens
gtccatagtaaagatttattgcaacaaactgaaaaacaaagtacagacgcaaaggaaacagaacatggattctgctgtgttacacggtacataaacttctcatgtccgtgggagtaacataaaaggaagtaggttattt

SEQ ID NO: 2447 - DNA, 158 bp, Homo sapiens
ttcccaacctgccctggcaggccaggaagctccagaccacaagctgagtgggactggctcctgcctaacctccacggtcgtggggtaggttggaagagcacgtgagggaagccagattttcaccccaaagctgcattgctcccttaccattatgctaa

SEQ ID NO: 2448 - DNA, 172 bp, Homo sapiens
atgtgctgctggaggtaaacgggacgcctgtcagcgggctcaccaaccgggacaccctggctgtcatccgccacttccgcgagcccatccgtctcaagactgtgaaaccaggtacgccggccctgcgtatctgtctcggggtgttggggagaggggcttcagggtgggcgtc

SEQ ID NO: 2449 - DNA, 144 bp, Homo sapiens
ccaggcgcgccctcagacagcgggcacgggcggacgcaagggcagcaagaaatacagcgcttcgtggtggtataaaaacgagacctttactctggcaataggaattcacatttcaaaagctgatgattgtcaaggcgatttaaa

SEQ ID NO: 2450 - DNA, 149 bp, Homo sapiens
gagggacaagatatatacgcctagtggtttcatgtgctacgtttcatctccggacatcaatgaactgcagacacccccgcgcggccctgacttagccagagggattccctggttggagctgggtgggtgattgtgatgctttgaattga

SEQ ID NO: 2451 - DNA, 136 bp, Homo sapiens
agttcggttgcgctgcggagcgcagctgtgagggagtcgctgtgatccggggccccggaacccgagctggagctgaagcgcaggctgcggggcgcggagtcgggaggtgagcgcccagggaaaagagggcccggga

SEQ ID NO: 2452 - DNA, 313 bp, Homo sapiens
ctttcgtatgtcaaaataataacataaaatcagaatgtaaatccagacgcattgttttgctgcgattaagttgaacgaaaatagcaaggacgaagtaaggagagagccagcctacccgcgggatgaggcgtcccgcggcggagtgggctgggggcgtgtcgtcgcggaggggagcggcgaaccaggcaggaggcggaagagaccgccccgtgggcggaagtgacgcaaggcctactgtcggctgggaggggaggtgtagccggtctttgggggtaggcggtagtggcggaagaggttcggcggctgatggcgg

SEQ ID NO: 2453 - DNA, 253 bp, Homo sapiens
ggcgccctctgctggcgaggagccgccctgacggccctgcgcgaggtagtctctgagcctgagcgtgagcctgagcgcgcacggggcgcgtgctcgccaagagctggcgcagatttccgaagtgccacgaaacagccgccgcagcaatcaccgctaagacccagacttccaggcgctttaaaacgcgtcctagttctggttattaaatgaagcctgtcctttactgcttaggcacgctgtcaataatccggtt

SEQ ID NO: 2454 - DNA, 150 bp, Homo sapiens
ggcggtccgcggggcatgcagcggaccgggggcggggctccgaggcccgggcgcaaccacgggctcccaggcagcctccgccagccggaccccgtcgccctcctgatgctgctcgtggacgctgatcagccggagcccatgcgcagcggg

SEQ ID NO: 2455 - DNA, 147 bp, Homo sapiens
gaaagctgggccccgcaaggcgctccgaagcgccgccccgctccctcccggcgcacctgggcctcggcgttccggcgctcctcccagtcgcggcagctggccaggtcgcgctgccactgttcgcaggccggccgctcgccgtggacg

SEQ ID NO: 2456 - DNA, 145 bp, Homo sapiens
cgggcagggggctgcaggattcacgaagccacctccgccggggaccgccttctctcggagtggcctcccctccggcgttccgctttagtaagacgacactcaggccaaacagccgcccccggccagcccgactcggctctggagg

SEQ ID NO: 2457 - DNA, 142 bp, Homo sapiens
agggaggcgtctccgggaatctactccgggacgggtccgcggtcctcagtcgggatggagcgggggcggaggcagccggagggaactggagtccccattgcagaactgcggggccgggctctgggctgggcgcctgccccgc

SEQ ID NO: 2458 - DNA, 215 bp, Homo sapiens
tctaccgcttcttattgctgtgcattttcggagaaactttcttagggggagtgagcacgccagggacatgaaggcttgcggcagagtttaaaaagccgcaggtcccagaaagacccgaaaagggaaggccttattttggtgggcctctgttcagtcggcttcttgagcaagccccgagctcgccattcacccctaagcctaagttctaaagttaa

SEQ ID NO: 2459 - DNA, 203 bp, Homo sapiens
tgggcacacaaaagagcaggcgcgacctcggaccagctccgaggcaaaattcactcagcgcgggacagcgacagggaatccggccgcacctgtgcctgcagtctcattgctcggaacggcgcgccactgtgacgtgtcaggccccgcccctgactctcctcatagtgcccccgcctccttgcgcgaagtgcgcaggctcctgg

SEQ ID NO: 2460 - DNA, 140 bp, Homo sapiens
agcgcagtctcgctttcctcatccgagaagcgggaacggcggtgagcgagtcaagcgccgagtggtggcctccgcagatgcgggagcagggcgagcccgcgaccccggggctgaaggccacgcgggagccccggacgcgc

SEQ ID NO: 2461 - DNA, 102 bp, Homo sapiens
cggccagggggcacagctctgccatggcgctcccaggggtcgggacacaactgctgcacccgcgctccgaggccgccgaggaaacgaaacctagctcgagag

SEQ ID NO: 2462 - DNA, 173 bp, Homo sapiens
cctcggccgcggcagtcggaggaggggctgtggaggcgggggcaggggcgctgcgggcccgaaggttcgcagggtcgcggggggcgtctcttctccccggaggggctacggctcgccgctcgccggctctttgtgaggaaagatctgccggtttccccggagcgcgttcgcgg

SEQ ID NO: 2463 - DNA, 138 bp, Homo sapiens
gatgacatcaccagcatcatagatggaacaaaacacatttacagggtctctcttgtttgtacaaaggtcttcggggatccagtgaacacggaagcccttttcctaagtgccttggaatcttttccgaaactctgtgta

SEQ ID NO: 2464 - DNA, 257 bp, Homo sapiens
gaagttggtgggctttgctgggtgcacacggcccacgtggcactcaccagcctctgggctgcccttggcaggtgccgtccacactccagcactcagggaggggcggtgcaaatcctcaaaaactgaccacacaggcactggcacccaggtggtgagtaggcaggctgtggtctgcagacagaagctttaccctgtatacgtacgaggagtaacagctgctcatttgagtgaagtcactggactgcggcccttagagc

SEQ ID NO: 2465 - DNA, 151 bp, Homo sapiens
ccgcatggttgtggatgacgaactcctggctgaagagcgggtaacttttcgtcctcctgcggaaagccatggcagcgggcgcgcagcggccggcggggcccgcaccctgcgctcacgaaccgcagcgcaaacttctccagcaccggcccgg

SEQ ID NO: 2466 - DNA, 143 bp, Homo sapiens
gggagagtgggcctcggaccctcgcccactccccaggtggctgggagtgcccaccctggaactgccggccccgccggtgccacagtgttctctgccgtgccagtgccacaatgtcctctgccgtgccggcgccgcagggcgga

SEQ ID NO: 2467 - DNA, 142 bp, Homo sapiens
cggaggacctcaggaaagagggcgtaattgtaggaatgtggcttattgtattgaaatgagcctggggttccactaggcacgtctgcctgtcgtcgctgacatgccggtttacacttttcccttaggaggtaaatcgggtgta

SEQ ID NO: 2468 - DNA, 178 bp, Homo sapiens
ccagagccacagccctgcccctcgccccagtgatggtgctgtggtttgcttattttgacatattcgttcctaacacgctgaagatgaaaggcaggaaatgtgcagttccagttcccatagcagcagtggttggaccacgttgcgtcacatttacagaagggtcatgggatcctgaagg

SEQ ID NO: 2469 - DNA, 139 bp, Homo sapiens
ctgaccaattggtcatggtgctgaaacctttgtggggaatcgtggccaagtgcactgactctgtgggaaaacggcggcgtgaagggatgccaacagctcctcgccgggaagggaaccgcctcaaattgggaccatgaca

SEQ ID NO: 2470 - DNA, 79 bp, Homo sapiens
gttcctaccctcaggtgcgggaggaaggagcctgggattaggttaatgaaactgctggcagcctcacattcaggacctg

SEQ ID NO: 2471 - DNA, 155 bp, Homo sapiens
ccagcctcgccgccccggggcggttcccactagcacctcgggaggatcccttcactccgccggtccccgcagggcaggcggaccccacgcggccagtccgggactacccgggactacccgagactttgcatcgcgtggccgggccggcatcgccc

SEQ ID NO: 2472 - DNA, 422 bp, Homo sapiens
tggcgcggaggccaggcccgggacgctgctggggatgggcccgggcacagggcccggcatccgcgccatggaccgcgcagcttcggccactgggccttcccgagcctcctgcacccgaaccccgccgccgactgccccccgcagtacgtcgctgacgccactcgcggtgcccacctgtgggacactgctatctccggggagctcggacatctccaacagcccagtcggctccgccatagtcccagcgtttctacggagactggaataacggcactgcactgctgtatgcgagacctgcgcatgcgcgagtctcagtgagcgcgtaaacgctgtgcgtgccagagtgtgcgcatgcgtaagcacggtggccaatcctctagcgttccctagcggtcctgagtagccattacgtctgtagccgc

SEQ ID NO: 2473 - DNA, 139 bp, Homo sapiens
gcacccccgaacctagcggcccccattccggaactcccagctccacgcggctggggtcgagctggggcccgcgggcaggcgccctgagcacccgcgtgacggtacctgtggtggcagcacctcccaagctgcggcggcg

SEQ ID NO: 2474 - DNA, 130 bp, Homo sapiens
tgagagaccagcaagtgagtcgctccgagaaagcgaaggagcccactcttgtgcggcgctttgggaagacgcctgttggttttgaccccgaataagaagaggaagctgagagcgggctgactgtggtcca

SEQ ID NO: 2475 - DNA, 138 bp, Homo sapiens
ctcctcttcttcctttgtgtgtgcgcgagcggagttggggcggagggagaagggggaggtcgctctgtctgtccgtctcccgccgcctctgcccggtctactcgaagtgcggcgggagaggcgggagcccaggagagg

SEQ ID NO: 2476 - DNA, 261 bp, Homo sapiens
ccgtggcgttggagctggagctggctgggtggctgtgtctggtttctcggcgccaattcaccgtcttgggcctaggttccgtctctaaggaagagaaggagggaaaaagagaaagagctctcgtgggtagttaatgacaggcagaaaggagagatacagcggtctgggatctttcttcttgggtaggaatgcacgccgcctgattgattgaggggaatgaagtgataggtccaggtgaggctatggagtggtgtgtgtgag

SEQ ID NO: 2477 - DNA, 161 bp, Homo sapiens; identical to SEQ ID NO: 496

SEQ ID NO: 2478 - DNA, 164 bp, Homo sapiens
ggtgggaacgggcgaccccgggcgccgctgtgggctggcgggctccgacagatgtggagacgttttacataattgagcgcggggccccggccccccaccctccccagcgcgggaccggtgcggcacccaccgacagcggaggaaattggggctggagccctggt

SEQ ID NO: 2479 - DNA, 150 bp, Homo sapiens
tgtggtttcatgacctcatgacctgttcacggatcaggcttccccaggccagagattgaggagtgggggcaattccttattcatcctaggaggctcttaatcagcgtttgttgagtgaataggtgaacgaatgtgggaatgggataaaca

SEQ ID NO: 2480 - DNA, 170 bp, Homo sapiens
cactcaacggatcccaacaagccaccactaccgttaacagaatccggagaggccacggcgcaggcgcaacggaggtgagcgtgcttgcgggcggcaggccccaccccggaagcgcatgtctgcgttccggccgcagccgtcccccgcccaccatggcggacgccggctcg

SEQ ID NO: 2481 - DNA, 160 bp, Homo sapiens
ggagctggagctttggaatcaaacctagcttccaaacgattgtgtacccgtgaccttgggcttgttacgcgcgatgtctcggaccctcctttatcttttctgtaaaagggggagagtagttcctaccttccagagttgtcttgagaattatatgagaata

SEQ ID NO: 2482 - DNA, 154 bp, Homo sapiens
atcctgcagaccccacccttgccttaaggtgctgtcgccccttcacctccctccttgtgccgggccctgctgctccacgggtttcgcctccacaatcaccgcttcccctgagcccgcgttggggaggtgcccggggcctgtcctgtgacgcggg

SEQ ID NO: 2483 - DNA, 146 bp, Homo sapiens
ccctgcagcggaaccccagggcgggaggagcggcgccgagtcggaccggctgcaggccagtggtcttcccggaagtgcgcctcccccggttatttcccagaccccggcgcggggctgcgaacccacctgccccagagcggctgcgg

SEQ ID NO: 2484 - DNA, 142 bp, Homo sapiens
attggtaaaccgttctctattctgacataaaaccttcactaaaggattagagcggctcacagtgcctaaactgcttgtacaaaccatgccgtttatgccgagcactggctttccttcttggggtgtggaattttggtatgtg

SEQ ID NO: 2485 - DNA, 154 bp, Homo sapiens
ggtgagggactctgctccgtggccgccagtgtgggcttcccgggctagctctgcggcgaggtgggggagccgagtacgagccggcagaggtggggccggctgagggcggaagcggcggcgacgcgattacgaaacccgtccggctcggagcccg

SEQ ID NO: 2486 - DNA, 150 bp, Homo sapiens
atgttcttggtggcttgaagagggaggggcatgtgaggagccgagaagggcccctggctgacagccagcaggaaacagggactttctagcacgaaaacattagtgctgaggtcctagcaatgcccagaaattaccatgtcagtgctctgg

SEQ ID NO: 2487 - DNA, 249 bp, Homo sapiens
gcgctccctccctcccgagtgattcctcgaatcgtggccccttgggcggcctgagccctgaagcgcggcctcccttttctgaccgcttcgcgcttgcggggccaggcaccccatggggggcaagcgggccttgtgaggccacaggtgtctctggctgcgtgtcctactttgagggctcagcaagcccgggccgctgaaggggaaccggagactggggcccccggcccctctgcaggtgtcccgcttcct

SEQ ID NO: 2488 - DNA, 153 bp, Homo sapiens
tctctgcagagcaaccccaaactttccaggtgcccccttggcctccgctctgaaggcgcggggttcaggaacctccgcggctgccccaggatcgaggacccagagagcctggcaccctcgcccccgcgccgggggacccgccgacgcccctga

SEQ ID NO: 2489 - DNA, 107 bp, Homo sapiens
ggctcctcacccgctcagccactgccacctgcctgggaccctccccctgcggagcgggatgtttggcggggagaaatgcggaggggaaccctaggctggcggctttc

SEQ ID NO: 2490 - DNA, 154 bp, Homo sapiens
caaggcggaggcggaggcggcctcggaggtgtggtgccgtcgggtgcgggagctgggtggctgcagccaggccgggaaccgccactgcttcgagtgcgcccagcgcggggtcacctacgtggatatcaccgtgggcagcttcgtgtgcaccacc

SEQ ID NO: 2491 - DNA, 152 bp, Homo sapiens
aacagatgagcagataaggtagtcacctggtttcaaaagttccagtttctgcttaaagggagcaaaggacagagacgtctcactcagagcgtggcagttatgctgctccggaaagggaggctggtcccgcagttgaggctggcgacaagccc

SEQ ID NO: 2492 - DNA, 287 bp, Homo sapiens
gcggcggcggcggcggctggagagggtcctcggcagcctctgaggagcgcggggcgcggccatgagcgagtccagcggcagtgcgctccagcccggcaggcccagccggcagccggcggtccatccaggtagggcggcagggagcgcgcgcggggacggtgcccctggggtccgagggcgcacggagggagccgggtgctggaggctcggcctggccgctgttccctcccacccccgacgccgggtgctcccggctctggggaacagcaggtgggaaggagatcttc

SEQ ID NO: 2493 - DNA, 140 bp, Homo sapiens
ctcggtctaagggggcgcggtccagaccccgggtcttgcgtttcccgcagacagcatcgcggctgggaggacacgtagccgcttcttccctaagcggaggtctgaactccggcttgtaccacttccccgtgggtgctgtc

SEQ ID NO: 2494 - DNA, 141 bp, Homo sapiens
cactcccacctgcagcggcgccgcgtagctccactggccggtcgcggggctgtagcactccacggtgagcacgtccacgcgctccccgcgcggccccagctggctgccgcccatcacgtacactctgtcgctcagcgtgac

SEQ ID NO: 2495 - DNA, 143 bp, Homo sapiens
cgtagctgcggatgcgccactggaacctggcgggcgtctaggaggcaccggccgcttcccaccggccgcatccctgcgtctcgcgccccctccagacctgcctctgcctgcactggcccggtccgtgtccaggtggcggggtc

SEQ ID NO: 2496 - DNA, 175 bp, Homo sapiens
gcttcccgctctttggcggctgcagcaggcatggtgctggagcccaaggcttctgggaaagagtccaggttttcgcggagggagcgacggactcacgcgggatcgcaggcactgctgcaagacgccgaacaggctgagccggtaggcgaaagaagtaagggtcacagaagaagca

SEQ ID NO: 2497 - DNA, 141 bp, Homo sapiens
cgccgcccgggacagcccggaggttggtaactggtgaccatagggggtcctggggaggttagatgctgaattttctgcgtcagtttactctgttaaaaaaaaaatgcacaaaacgctttccgtttcctacccaagttcccg

SEQ ID NO: 2498 - DNA, 134 bp, Homo sapiens
gggggccaagcctcctagccggccgcccgcagcctatttctgaagcggaggtttgtctagagctcagcggggcccggcggaagcgggggccgcgcgtcccccggcgggcggcgcccaggtccgggtcccgcggt

SEQ ID NO: 2499 - DNA, 170 bp, Homo sapiens
agcggactaatcccaatggcagttcccaggctgcccagagcccccgtcgcgacccacccccaccccggccttacctgtgcgcccccacgcgccctcacccccactgcgcctgcgcctgcgcctcccgggcctagcgagcaggcccggagctgctggaagacaggggccca

SEQ ID NO: 2500 - DNA, 141 bp, Homo sapiens
tccagcttttcggcctcctccgggcgccccctgccggtgggccgcttgcccgtgctccaagcccaaaacagacgcgtcccctctagtcgcttttagccttcggtctcggtcctgattggctcagagtcgctcgtgatccct

SEQ ID NO: 2501 - DNA, 141 bp, Homo sapiens
ggcgggggccacctgccctccggcgggaagagctgggcagggcccgcggagtgcagggcggaggcactggcggtccgcacccgggtgaggtgaggcgcgtaaccgcatctgagccggactctttaggacgagtcccgtccc

SEQ ID NO: 2502 - DNA, 257 bp, Homo sapiens
tctacacccgaaagtccggacacctgagcgactttccgggccagaggccccaaggtgcatcggggcagagccggaagcggacgctgaaaactggcggctccttaatggttccggcggcagggaccgcagcgacgccctcaccggaagtcccgcctctgccgtgggcctgcgagaatcgaggcactcgctggcgtacccatgtatcgaaatgagttcacggcctggtaccggcggatgtcggtggtctacgggatcgg

SEQ ID NO: 2503 - DNA, 159 bp, Homo sapiens
tgaggacaccggtgacctttgggggtggagagggaggcgcctacaagccccttcccctctcttcggccggacacaaagcgggcttttccacctagagtcccagcgctctcacctgcgcaccagccgtcgcgccgccccaggccgccaccgccagaggcc

SEQ ID NO: 2504 - DNA, 137 bp, Homo sapiens
gccccggggtcctcggtgccggctggaggggctgggcacctctggggcggggttctgctccacctgccctcggcgcggactgtgccctcggcgggcacgcggaccggcggggtagggctagggcccggcttctctgg

SEQ ID NO: 2505 - DNA, 257 bp, Homo sapiens
ccgcccccttttcccgggctgccggcttccaggttcttgactccacccggagcgcggggcctggggacacaacacgcacctgttgggcgtcccgcagcgcctcgccacgccctcgggaaccggaggcggagtcccggtctgtgagcagcggggcctggggggcttccagccgcgcgtcctgcaacgtcaaatccagtgcgcccagaggggggacgctgtctcggggtgcctgtgaacagccttcaaaccatgggccc

SEQ ID NO: 2506 - DNA, 163 bp, Homo sapiens
cgcgtgtcccgcccgcccccgccagctgggccgccggatcccacccgccgccgccgccttcctcccgcctcggccgcccgcccccgctcacttttacgcggttgagtccggcctccagccggagctgttgaaccactttcttcatagcggcgacgctggagga

SEQ ID NO: 2507 - DNA, 161 bp, Homo sapiens
cgccgcggccccagcggcctccgcgctgcgaggagcgggcgcttggacacagggcgagttgtttgatttggcggaggcggggaggccggcggggagcgagcgagggaggcacgagagctgggcagcgcgggcgccggtctccagggtagggtccccgcgcg

SEQ ID NO: 2508 - DNA, 201 bp, Homo sapiens
gtgagttcacactgcggagccgacagcagagggtagagcaacctggggctgctgccattggaacggcgagttgagcgggcctgtcagggcctctccgccgagggccgggggctgcatggtgctcgagccccagccggccacaccccagtgcatcgggtggctgggcttccagtttacaccgggcctaccagggaggccttc

SEQ ID NO: 2509 - DNA, 147 bp, Homo sapiens
tcctcaccctttgccccctattcccagagaagaaaacctcggggtcctgttttctcgccgtgtgacgttcctgacccgctagtccgggttatttatagcaggaggggaggggggcgaggggagcagaaaggcaatgctgtctctcca

SEQ ID NO: 2510 - DNA, 136 bp, Homo sapiens
gggcggacgcagggcccgccccgcgtccctgatctggccgctcggcgtccgcggctgtcgccctagtcccgccttctcgccaaagctgaccaatcaaacgcctaggccttagctcgagaaccaattgcaacggtag

SEQ ID NO: 2511 - DNA, 150 bp, Homo sapiens
gggaggaggagcgatgccccgcgcaggcgcaggcgcagacgatcgcggcccccgcctcaggccgcccggcggcctcgcctcactcccaccccagaccctcgcctggttggccgctctgactcaccgtcccgagccgtgcccatgagctgg

SEQ ID NO: 2512 - DNA, 450 bp, Homo sapiens
tccgtggaacaatcccctcatatgtaaaatcaggaggttggactacattgtaagtgtccttttgtttccacctcttcgtgaccgaatgtggggtgaggaaggggcaaaaaagcgatcccggtcttggctccttcttccggcacgggccggagctgacacccccacggaaaaccgcacagcgcctccgctctttctccacgggctgagggatcaatgcacttccgcataggcctagggccccacgctccgcgatcagcgccggaagcgcacggcatgctgggatttgtagtcctccacctgtggccggcaggcgtttagaacgcgaggtctagttggcattctgggatacatagttcctgggcgggtgggggcggattcgttggtgtaatctcttttcggcttaaagagccagaagcgacaccacagactccggcgggtcacatgactcca

SEQ ID NO: 2513 - DNA, 236 bp, Homo sapiens
gagggggaagggctggctgcgcgcgtccctgactccccagctgcgtcccggtcccggcctgcggctgcgtgtccggcggcggaggaggaggaggagagagaggcggaggcggaggaaggctggggctgggctgctgcggtcggcactggctgcggtgcgaggggcgcgctctttacgcccgaggcgcggcgctgggagagaggcgcgggcggagcggggcgcagggacggcgcgcg

SEQ ID NO: 2514 - DNA, 142 bp, Homo sapiens
gagagttactgagacttggagaggttaaataacttgcagccaggtcacaaaattaatcactgagttgagacgacaattaaggtatggccgactccatactgcctcctagccgtctcctcgagtagttcatgccctgttaact

SEQ ID NO: 2515 - DNA, 147 bp, Homo sapiens
ttgcgccgcgcaggttaggcagggccggcggcgacagtggcggggagcaggctccggagccccgggtgcagatgtgggcgcccctccggatgaccccggctgagtccacaggtcccgtgtgccccacggctggggctctggccagcg

SEQ ID NO: 2516 - DNA, 160 bp, Homo sapiens
gaagaagagtaaggaaagtgctggggaggctgtcagctactgacgttcgacttcaggttccctccaggtggaagaacgaggaccagaaagcaagggggaacgtgcccatcgccagaggaggagtggcacgctcttctgctacctcttctccaaggctctg

SEQ ID NO: 2517 - DNA, 156 bp, Homo sapiens
cagagacccttatttctgcggcggccgcgtctcctgtgctgaggcggatgccttctctctagtcttgcagaggcgaagccggttacccggcccctcccagcagaggtgccagtctagggggagaatggcagcagagaggaatcaaaattgacacta

SEQ ID NO: 2518 - DNA, 127 bp, Homo sapiens
ttggcccacacaatcgcaacacggtttggagtaagacgcctgcatcccggaggagcgcattttccacgccctggagctccgcaggcaagaataccccgtgccgcaggacaggcccctgggacctccc

SEQ ID NO: 2519 - DNA, 122 bp, Homo sapiens
cccgctgcgtgcactgcgttctgagaggccggggagagactctgggcccgcggtcggggcggagccaaggtcccaacccacattgaacgggcttgaggattacttggagggctcaggatcta

SEQ ID NO: 2520 - DNA, 129 bp, Homo sapiens
ggtctggactttctccgaggatgccccattcacaaaattccgtcctggaccctcaccgttgaggaacgctgaggaccactccccccgggggacacaggatgtgtggggagcgtaggccaccctgaaatg

SEQ ID NO: 2521 - DNA, 169 bp, Homo sapiens
agagcgtcggccatcttggttttcatctcccgtggagatctactcggtccgcctattaaacttgagacgctggggtcccgcggagccgctgtgtcaggctctaaagaggttttacatttcccagaggaaagcgctctatgggctttaagcgccgcggagacaagcgctt

SEQ ID NO: 2522 - DNA, 138 bp, Homo sapiens
actcccgcgcagaaggcgccgccgaaactgtgccaactgccgcaccgggctcccgcgcctgcctgggagcggcgcgaccccgaactccgcgcttcagcagccctgccccatgcagcacttccacgggcgcggctcgga

SEQ ID NO: 2523 - DNA, 324 bp, Homo sapiens
ggtctctcgacccgcacctgcgcctcggccgccggccgcgaccctcaccgccgcgaacccggacgcatggtccggctcgcgctcatccccagccgctccgcccgactcctggatacctcggccccggcagcaggcggcccggcaggctctttgttaccagctgctgcagcttccgggagcgggccggcggctggggagcaccaggagccgggcgaagaggggcacggcctcgcatagggggactccggaaaaacgcagccccaacagcgccagacgccctgcctggttacccctacagcccccaccagctcatggggacctaca

SEQ ID NO: 2524 - DNA, 248 bp, Homo sapiens
gaaaagcgggcggtaggggcgctgcgcctgctcccgctgctcccggcccggccaggagtagggagggcactgcccgagccgcggccccggccctaccaggcctggagccaccaaagccacgagagaggtgggcgccgtcggccaggcgccctctcggtgcgcacacacgcgcgtccccaggcgccgctgtgcccccgccgcccaccacgtgccctggccaagcccgccaagggccgtgcgcgtttggg

SEQ ID NO: 2525 - DNA, 336 bp, Homo sapiens
atagactggaaaatagacccggacagcccgggaggagggcggagaggagtccgacctccgcaggcagccgcgtccccgccccgcgctgcctacgacttagggcccccggcccatcccctgccgctgcagggcgctcacctctgggacgcctccccgcgccgcctgcgccacggttggctcctcccggacgcaaaagcggcgccctcgctcgggctcctgaaaacctcgcggccccgcccacggaagggcccgcccacctgccaggccacgcccccgtctcggccacgccgcagctcagggttttctctgagggctgtgagaggctaggcccgggga

SEQ ID NO: 2526 - DNA, 157 bp, Homo sapiens
gggtgacaagagtgaaacaacgtctggaaaaaaaaaaaaacttgcggaaaagatgaaatgaccaagactcgcgcagtgctgcccgtcaggctctcaactagtcgctcttcacatctgattcatgtcttaaagcagcctcgcaggtaggtctgcatca

SEQ ID NO: 2527 - DNA, 154 bp, Homo sapiens
gccttccctctctgcccacttccgacgccttcttctcgggcatcaggcggatcctcagtcgcccttcgccttggcgaatccaccaactgaacagctcgctgagattgaactggagcagccccacagccgcctccccggggggcccgacgcaacc

SEQ ID NO: 2528 - DNA, 140 bp, Homo sapiens
atctccttcttcctccatgtccaagacacccagcttaacaaccctgtagcccccaacttggccctagcggcacctcgcctcgaccttgccattttatactcaattggggcgtagggttctgaagcccagggtagttggtg

SEQ ID NO: 2529 - DNA, 137 bp, Homo sapiens
ccctacttacttcttcaccccctccgcttcatttggcatttgccagcaggcactcgctgtgcctgtacgtttcgcagagcagctatcaagggcagtttcagggatcgttactcttacgaagggttttttggatacct

SEQ ID NO: 2530 - DNA, 115 bp, Homo sapiens
aggtggagaggggagggcaggccccgccagggggaggagccgcctcccgcgtccagctgtcggggctccctcccgtcgcggctccgctataaaacccaggccggcaggatcgctg

SEQ ID NO: 2531 - DNA, 314 bp, Homo sapiens
tgaaagaagctggtaagggaggcgtcgctgattccagagagctaaagccgatggtaggtggagatgaggaggtggccgccctccaagaatttcactttcacttcctctctctctctgtcttcactgactgcacttcttcaggagaagcttttgttatctgtatcacgcaggacatgctgctctttctgtttgtgtgcttacccatcacttggatggcagaattcttgtcacaactgagaccaccttctataaaagtaagctgaaaggaacagcatcctcgtcagtgctcggcaggggcgggtaggggatgatgg

SEQ ID NO: 2532 - DNA, 148 bp, Homo sapiens
cggagggatgggaagctcagcgggggtgtgagcggagcgcgtgcgggtggcgagggagcgccagtgccaacctgggagccgtgcctgccttccctgccgcctcgcgtcgcccaccgaagggacccggccgtgctgtccgcgcccagag

SEQ ID NO: 2533 - DNA, 282 bp, Homo sapiens
agacagaagagaagcagttaacagacaccgactgtatacacagcggtctgccggcacactgcaaaaaagccgatacgccttacaggctcaggaagttgactaacccagggaaaagccccatgccctcctctatgaaagggagtgtgtggttggtagaacccaaagtaaacacggaaaaattcattcaagaatttccttaaggcctaccgtgaagacgtcggaggcaagttaagacgttggggagcaggtaagagagaccagagttcagaaacagaccgataa

SEQ ID NO: 2534 - DNA, 157 bp, Homo sapiens
ggagtggaaaaaccacttagatgtgctcactttaatcccctgtggactttctctgtaggtctctgcctgggaaattcgtatgcaccgatgtacaagcacgtgcattgcagcattcgctcgctcctcagtgttatgtgcctagacgtgtcatttctca

SEQ ID NO: 2535 - DNA, 147 bp, Homo sapiens
tcctccagcgctgggggagcggacgggccaggggcctctagggaagcggcgctccgggaccggggtggctttcccgtctctgtgtgcgcggcgatccccacacccagctcgggcggaggagccctgagagaagcggctagctgagag

SEQ ID NO: 2536 - DNA, 109 bp, Homo sapiens
ggagtggcgcgcggcgtactacatgtcccgtgagcctccgcggcgggacggggcggggccgcgggacgccaggaggcggaggcggagtggagttaggtaagagcgttac

SEQ ID NO: 2537 - DNA, 155 bp, Homo sapiens
ccggccgcgggccctgcgccaccccctgccccgtccttgacccggctctcgcctccgcttctgccccttgaaaccttggcgatcctatttcgtggactcctagatcggccctgctacttgcaaagggtatgccgggccagggaaaccagggatcg

SEQ ID NO: 2538 - DNA, 333 bp, Homo sapiens
tctggcgtcgccgtgtaggggaagggagagggcggctgactagctacccgtaatttcggctcctgtgcgcaagtgcggaagtgcgctggccaggagcgtgatcggtttccggtcagtggtgtggtaccgggtacccggagacgtgtatcggacggtgggccgcagccatggccgagagaaaacctaacggtggcagcggcggcgcctccacttcctcatcgggcactaacttacttttctcctcctcggccacggagttcagcttcaatgtgcccttcatcccagtcacccaggcctccgcttctccggcctccctgctcttaccgggaggta

SEQ ID NO: 2539 - DNA, 207 bp, Homo sapiens
cggaggctccggggcagcgctgagcatcagcaccggggacagcgcgccgcgctgcattgtgggaaactcctgccgccgccgctgcagctaccgcatcgccccccgcggggctggtccccaccctttctccgccccctcacctccggcagccgactccggctgccccctatgggtctagggaaacccctcgagacttcccccatgctc

SEQ ID NO: 2540 - DNA, 152 bp, Homo sapiens
tgctgctcctccaccaagggtgctcacattctccaggaaactcccttaagggttagcaaccgccgagtaggtttcggtcccaagatagaaaggtaaagcggggaattcagggggtttctccgaaaagtacgttgatgaaacagctattgttg

SEQ ID NO: 2541 - DNA, 1489 bp, Homo sapiens
ccagcgtggagtcttggcgcggcggtcccggcgaggctgcctgagagggtggcgggctcagcccagactccgtctcggggccacgagggctgcaaggccgcggctcccgaagaggagggcctgggatgttttgctcaagggcgaggcggggtgctcaggcctgtggggtcgctggggagagcccggcacttggcttctgaggcttttcagttgccgtccgagcaggagggagggaatgagcaggcacgcagggaaaacccagtaactgctttgcaaacgcgacccctggtcacaataacccaggcgatgggggcagtttcaggttcctggtgggccctgccccctttcctaggtgtgccctaggaggtggggaaaaaattaacactgtttctatttttctttattgtccctgcaacagccaaagaatttagaacgagtctacgtggacacgcaagtttcagcgagcggggatttcctgcgaggccgagcgcgaggaacagccggccccggaggctcgggctcggggtctccccggggacgcggccgactgagaaggccggggcgctcgccgggcgcggcgccgtcctccgtgtcgcggggacggaaggaggcgacgcaggccaggagtcgtgcgcgcgggcggcgagggggcgctgtggcccgtgtctgccggcccgagtcccggcaacggtgggcgcgacccacctcctcccccggcggcttaattcggggaagaagaaaaaacggcatcgaggcatttcaataaaacctaagcgactcctgatcctttctcattgtggttccttatgagctttcggtgtctggcggggaaacagttaccgttcgggggtgtggcaaacttttttggcaattaagatgaaacagacgcttttatgtgggtttcctttaatgaagtaacattggaaatgtaagtagtttcagtgcatcaaatcacatcgctaccgtattcgcggtcaccggccctcccgttccagggctccccgcgtttgtcgagggagagagcgaggcaggaacagggggccggggacatgagaagtttggctaagaaatttttcttttctttgaaaacaaaagcgttgttataaatggaacaaaatttaagtcaacatggaacccacatctctttcaaacgtcgtttctaggtctagtactctgtgagtaggttggactggatttcacgctcaaccggcatttctaggctctcaaagacgcttccgaggcctaaatgttttcctggaaaacacgtgcagaggagcatccgtggaagactgaaaggtccccgcagctccagtcctggcaggatgtgcaaggcctctcgaggttttcaaatgggcccccgaggcctgggagatccccgagtagccacgcgggcgccacttcagggacgcggggcggcggctactgtgggccgggagggcccccgcacgggctgctctgagcgcctggacccgggaccctgcgcgcgctc

SEQ ID NO: 2542 - DNA, 141 bp, Homo sapiens
ccttggcgctgttggtggcggcggagacagctgtgaagtgtgaggttctttgtctgctggcagctaggggcgacgaggcgggacgtcatggaagtgtaagtcttctcgggcgcgtcccttttcgcccgaggagcccaacgg

SEQ ID NO: 2543 - DNA, 284 bp, Homo sapiens
cttggtagccccgcgccgttaccgtcgcccctcccggccgagggaagggtcctggaaagcgcgaagggcggccaaagcccggattagggccaagggccgcatctcgccgccaccgtgggaaactatctttgagaggagggaggagtcgtggcctggcctcattcccgctcacctccagccttggccgcctctcgcgggctcttccccgccccgaacctcccacctgcgggcccactggcacccgcggcgctcagaggctctaggtggctcccggcggcggttcg

SEQ ID NO: 2544 - DNA, 57 bp, Homo sapiens
agatgtctcagacctctcctctacctccgcctcaacccttccctctctgttaggaga

SEQ ID NO: 2545 - DNA, 120 bp, Homo sapiens
agagagtcgagcaggtcgatgagacgggaaaaggtggagccagtgggcacggtgggcggtgcggagggcggggctgaggcgcctgagcggggcacaaccctcctagaggcgggacggttt

SEQ ID NO: 2546 - DNA, 156 bp, Homo sapiens
acacacactcacctagtcccttctgcacccacgtccagcgcgcacccctgccagcggcgccagctgggattcggagacgacgccaggaaacgctatcctggtattttttcggaccgtctcatcgcccccttcccgacctccagaaccccaatcccc

SEQ ID NO: 2547 - DNA, 209 bp, Homo sapiens
ggaaaaggctcagcagcctgaacggtaggcgagcgggcagcatgaggaagtagctccaaaggggcggagccaccagcgcgcacgcgcactagggtccgaggcgcgcatttgacccgagacgaaagcgcgtgggtacttgggagctgtcctggttggttttgcgtctaatcccgtcagttctcgcgatttaagctctgagactgagaacc

SEQ ID NO: 2548 - DNA, 955 bp, Homo sapiens
ggggccctggcctgtggctgccacatcccgggtgggggcacggcctttcctggcgtggatgctgagcaaacgtagggggaaggggagtgaatgaggagagccaggtagctcaggggctgaggcctcactgagcagggtcccgcgtgaccggtccccaccgctgacggttcctggggtaacactcaggacagggagaggcaatggaaagagacgtggccgccctcgcatcctgcagctcccgcactcccagcctcccagcctcccacccagccccccagagcccaccagtgaccccgcccactgggtcctcagatggctcccacgggatctcctgccttgatctcctgtccacatggaggtgaagtgggttgctctgaatgaggggtgccgagcctagggcgcagcccactctcctgggtccgcagcatcacgcagcccggaccacaggctccttacaagaatcggaagggtccctgcaatcgcccttcgcactgaggcttcctactgtgtggtgtaaaaacacaggcttgtcctcccttgctgcccacggggctggagccgcctgaaaatcccagcccacaacttccccaaagcctggcagtcacttgaatagccaaatgagtcctagaaagcgagagacgagaggggaatgagcgccgaaaatcaaagcaggttcccctcctgacaactccagagaaggcgcatgggccccgtggcagacccgaacccccagcctcgcgaccgcctgtgacctgcgggtcaaccacccgccgcggctccacgccgtgggcacagactcagggagcaggatgagaaagctgagacggcgcagccacggcccggtgccttcacgcgcacagcgacacagccccagccagcggggcccacgctaaggcggaatcccacagaagcctacagagcgagcgcgcgcctgtgcttcccaaaacggaatgga

SEQ ID NO: 2549 - DNA, 164 bp, Homo sapiens
gtcctgatgaagcagcggcggcggatgcgtggaagggggcctcgaggaaccaccggcggcatcaggagacccggtcctgtaaaagactgagagctccgcctctccgatactcgcgggcagccattgcggcgcacagaaccgtccgcgtgtgagcagcgcgcacg

SEQ ID NO: 2550 - DNA, 215 bp, Homo sapiens
tccgggggcggagcaaccccgccccgccccgccagccctctcctcccccttcgcccacctcgacccctaagggtgggcgagatgggtcccttccagcaacggattccccaagatggacatcgcggtggcgtgctgggagtcaatattgtttggtccactttctcagttcctgtaatcagctgtagccacattccttgacttttgcttcctacata

SEQ ID NO: 2551 - DNA, 149 bp, Homo sapiens
cgggcatccggaggagcctcgcgcctccagccgccgctcctccccaaggggctctggcctgtcgggtcccccccggcccgttgtcgccccaaccccgtcccagccgattctcttgacttctgtcagcggcactcacgctctggccattg

SEQ ID NO: 2552 - DNA, 382 bp, Homo sapiens
tggccgccgagtctacgcaaatgatttgcataatgaggaagcagccgccaatcagagtgggagttgactgggctcgccgggggcggggggggcggctgggctcacgcgctcctgctcgccatggcaaccggaccctcgaatgccctgtgtgtgtcgagtgtgtgcgggcgtggccgtggatcgcgcgtgtgcgccttgggccgcgtgaggggaagcagcttcgtcatgcgtgatggtgtctgccggagtcggggctaatccccaccgcacacacaggcacacacaggcaaacgcaggcacacgcaggcacacacacctccaaacgctggtgcgtttcctgcgggggtggatggggattcctcttctctattcccactatcga

SEQ ID NO: 2553 - DNA, 277 bp, Homo sapiens
tttcaactcggccgcggaccaggaaggcgttctgacccgctagagctcggggacagggaccccatcccggtgcctagagcgtctcccttagtcggcgtgggccagcgccagttacctcacgagcactgaactagcgcctgcgcccttctatacttctcgctctttcttcaagtcacttctacccggcgagcccgccctcccgccaatcgtcatttccggcgggtgctctgcgtcatttacgtcgtcacttcctgccgatgccggtgtggacgctgtg

SEQ ID NO: 2554 - DNA, 236 bp, Homo sapiens
tcttgtggcgctactgcgggctgtgcactcaggaaagtggccacggtttaggacgacctcgacacgaccctgtataggacgcaactaactccagagaaaacgagcgagccccatgcaactcttcattcctgcagggagaacaaggaggtgtgcccgccagggaagggacgcacccccaccggcgctcgctgccttaacttccccatccccgcgccagggaggggccggagtcgccg

SEQ ID NO: 2555 - DNA, 166 bp, Homo sapiens
gcagaagtgatgtttgagattttcaggtcacattcgtaaaaaggaagctggctgccctcccttcgcctttctcctttcctgtgggctggaatgtgggtgtagtagtggtgaaataacttcagccgtgtagacaggggaaacctcagtgtgcatcaaagtcacctgg

SEQ ID NO: 2556 - DNA, 221 bp, Homo sapiens
cgccccagctgggactcaccgttgtccaggcgcgcgatctggggcagccggtaagtgctgaccaggaggtcgagcggcacggccaccgagctccacttcacatccttgaggctgcagcccagcgagggcgccgggtccatcttccccgaagcctcctgtcccgcgctcccccgccgccgccaccggcaccacccgcgcctcggcggccgccgctgctcgcg

SEQ ID NO: 2557 - DNA, 239 bp, Homo sapiens
gtttaggcatgttaggtgaggtttacttccggagccagacttttaggcaggttgtcttgacataagtcaaggtcaggaagcgatcttcaggacatgcagacgatgcccacttcctgctgtggtcttgaagagggctggaaggcttgtgagcacagaggcactgagggctgtcgcatccatacaggaagacactcagggctcgtctccggtgcctcattttataagcatggaaacaaaag

SEQ ID NO: 2558 - DNA, 1257 bp, Homo sapiens
ggtgggcgccagggatgacccgggacctagtcccccacccagcgggggcagcagcgcaatgaggggcgtctcgcactcccccagcagcacatccctgcgaagtcccgcgcccctgtctagcaccttggctctcaggctgcgggcggccaggtccggggggccgagcccgtcgaaaaagaaatcctcgttgaagatggggttggcgctgcacttgaccacgcggctctgctgctcccgcggccggacgcggggccgcagcctcagcaccacacagcagccgccgccgccgctcccggggcgggaccgcggccggggcaggccctcggcgctcactaggcgcagccgcagccgcccgggcccggcctgatattcggtggagagccgcagctgcccgccgcggggccccaggcgcagcacgctctcgcgcgtgggccgcagctggcagcacaggaagtccaggtggaagagcggcggcgtgggcggcccggcgcggcgcggcgagtgcgggctggtatcggccgagctcgctttttctggggacagagagtgaggcctggacacccggcgccggcccaggcctggccgcggggagccgaagggcgacgagtccggcgacgaggccgtgtcgctgtcgggggcccggcagaggcgcaggtccggggcggagacgtgcagccgggactgcgccgcggggagtcccccggccggggcaggtggcggcccgtggaacagggattcccgccggcgcgtgtgcgggctctcgggcaggaaggcccagccttcgcggcccgccaggtgaggcagcgagcaggtcgcggggaggccgcgccccgccacgtgccgccgggccgcgggcactgcgccgcccgggtccgggagccgaggcgggatgaagaactgcgggatgcgatccggggtgaggacgttggggcaggcgcttgtgggcgggcccggggcgcgacgcttggagaacaggccggaaggcgcccaacgggccgcaggctccgcggcccccaccttatagccagctttttccaagagccacatgcggtgggtggggtaatggaattccgaattccgcagggccgagagggtccaaatcccgtctcagatgggagtgctcggcggagcggggctgggcgaggagcgcagaggagtcagaggtgagtgatgctggcgtacaccgggcggtcagccaccgcgccccggtctccggacccactgggagcgcggacccctatttgagcagaaaaagaa

SEQ ID NO: 2559 - DNA, 148 bp, Homo sapiens
attctaaccgcaaggagtagcggaggggaggtcgtgatggcggcgccggaggcggaggttctgtcctcagccgcagtccctggtaaggcgtggggccaagagtttggggagccttggggacttgtttcttccctaccgccgcgccatc

SEQ ID NO: 2560 - DNA, 216 bp, Homo sapiens
agctgccagaggggaggcaaggtgtggggaagttttccttcccgggcgaagaagctctgcggaactgtcattttccggaactggatgcttgcttcctggcggggttctgaaagcgaacaccgcggggcaagatggcggtagtgcgtcggctgctgccccgggtctggcagaactcgggtgttttgggctgagacagtggcagctgcggccccgacc

SEQ ID NO: 2561 - DNA, 227 bp, Homo sapiens
gaaataccccgattgggtgggacttaatggactttccgcgcctgcgtccaggactgaggccgtgagagcgctctcttcaggcgctctgacttgtttctgctccatctctctagggggtctttcatggtttgggcacaaggattcgtcgccagaatagaactgaaagctcggaaatagacccgagaatacaagtatgccagaaaaaaaattgtcattttaattatctg

SEQ ID NO: 2562 - DNA, 255 bp, Homo sapiens
cggcgtgagctgggcggcgaggtggccagcgctctggttgggacgcaagagagcggcgaaggccacttggatgagccagcggctagggcggccaggcaaaagcagcgctttccgcgcggaggaccagatgcgctccagccgactcaccggcggccgggctcgcacacgtgcggcgcagcgacgcgccgcggcccgactggacccgccccgggggcggagtccgctccctgccgccggccccgcccccggcccacc

SEQ ID NO: 2563 - DNA, 145 bp, Homo sapiens
gaggaacacaggaagtcgaggggcctttacgggcctgcggagaagcggagcctggttacccgggagactcgggtgcgaggggcggaggcaggccgctggggcctgacctggccgggctggcctgccccattgatcgtgtactttg

SEQ ID NO: 2564 - DNA, 155 bp, Homo sapiens
agctggctgcttcagctgcgagcctgacagacatgggaggctctgcgggccgggagctggacgcggggaggtgagaccggccgggggctggccgacaaacttccttttcttgtttggtttccctttttatctattgctatcgcgatcctgacagt

SEQ ID NO: 2565 - DNA, 137 bp, Homo sapiens
gtgacacgagccccaggcccagggcgcggctgcgcaccgcgcacaggccccggtagagaccggccacctgcaggaccgccggtcccgcgccacccgcagccgccaccaccacagcagccatggccgcccccgcctcc

SEQ ID NO: 2566 - DNA, 566 bp, Homo sapiens
cacaagaaactcctggcaatttgaattatttccgctcctgcacctcagtttccgcctctgtaaaatgggctcgcgctgccttaaccctcctccgcccgcccactctgacaccaccggaaaggattcattcgggaacattcgtggggcggagacgggacagggggcctcggcctgtagcgtcacgtccgccagggttacctgtggggctgggagcgaaccgcactcgcaccgcaaccccggcatcagtgcccaggttggcctcgcgccgtcctacggggcggccagaggccgccgaaggcctctcgcgctgcagcagtctcctcaggagcgccgccatgtgggatggaatagcacacgtgggcttctccctgcgtcacttccggggactgcttccagccaatcggcctccgccacagccagcgcagccttgccccttaaagtcacaggccccctagcgcgaaatcccacgcccccctggacggctgcggccgcactcgccaccagggggcagaggccagagaaagggctatttcccggacccgcccccttcagcttgggaaagcgaa

SEQ ID NO: 2567 - DNA, 209 bp, Homo sapiens
agccattcgccctgcgggaacgtgtccgggcaggttcccagcgcagctgtgggtctgcgcttggccgagcgactgccgggtcacgacttctgcgtcttcttaacccgtctttggcattgcccgggccccgagtcacacaggaggcagcgccggctccagggggccaggcggggaccttctcctcagagccccgggcagcttctgcgacc

SEQ ID NO: 2568 - DNA, 824 bp, Homo sapiens
aagactgcttcagtggggtaaacttgaaccgctgagaagacaagcagggagtcggtctcgctgagatttttacctgtggttctaggaacgcagaggcatgtgagtgttcaggctttgcatagaccactaagccacttctaagaacaaggctacctgagccattttgcaaaaatatgtacgtgccgaggcttttcctccccacacctacctcaactctttctgccgacacactgcacttttcaagggaacccaagtttgggttcggcaagaattgtacgttgcacaccgtgtgtgataattccagggaatttcaatcgcatcttgtcttccttcctaagcaaattcggtgggaacctggtgtggtgtgatagaaaaagccccgagttctctgtggtagaccacatcaatttcatgtgccagtctctcagactccggcttgcctctctcaaggaagggaacaatggtttgcttggcttcactcctctctttccccccaatttccacatgggtatctggctaaaaatgagttacaggtttccttctgtgagaattgcatggactgataaagtaccatcccaggaagaaaacaaagatgctgtcttccctttcggctcacagttgccgttggggagggaacacacgctgtaaattataggcagccagaagtgaccgcattgaccactgcgagtggcccagctatggcaacaggctgagaactctgggggagagccatttgttggcagggatggtgattcttctagcatcaagctctaagatgatgaccaaacggtatcaaaagaaatgatattttgctacctctccgg

SEQ ID NO: 2569 - DNA, 136 bp, Homo sapiens
gggtgtcccccatgccccttgtgggacaaagccccaattcgcaggctaccctccagagctccagcggtccggttctccccatcagcaccctctgcgcacactgacccgcgcgtccctccgcagcctgaccgcccga

SEQ ID NO: 2570 - DNA, 120 bp, Homo sapiens
gggcagggccgggtcggcttcatttttctgagcgcctcggagtccccgcgtagttagtcggagtctgaaacttgcacgtccccacccccattttgttactcagccagtcaccgcttcctg

SEQ ID NO: 2571 - DNA, 159 bp, Homo sapiens
cccggcccagagccgggatgccggcaggacttctggaagggaaacctggaccagggccaccccgggcacagggaacgcggctggcaaggcgcatcctcgccgctcagtctccgtctccccgcatctctcagacgtcaacaaacccctgaccacaaagtg

SEQ ID NO: 2572 - DNA, 250 bp, Homo sapiens
gtccgctcccggtccctggcccctcagcggcatggcgtgcggggcgacgctgaagcggcccatggagttcgaggcggcgctgctgagccccggctccccgaagcggcggcgctgcgcccctctgcccggccccactccgggcctcaggcccccggacgccgagccgccgccgccgtttcagacgcagaccccaccgcagagtctgcagcagcccgccccgcccggcagcgagcggcgccttccaactccg

SEQ ID NO: 2573 - DNA, 138 bp, Homo sapiens
gcagcgccggcgaccactcacctgggcgaggcagcatctacccccggctgggtggcaccgaggccggctccgcggggcgcccgggctccccggctcggccacgcatccttccccgcccgagacagactcgagctaaac

SEQ ID NO: 2574 - DNA, 141 bp, Homo sapiens
acccgccttgggaagcccgtccgacgcgtacgctgcaggggccttcaataggggctgtcgccacctgcacccgcgccgctgcggttcgcaggaaactcctgtggcttttcggaagcacaatgcagaacgcccggtgagggt

SEQ ID NO: 2575 - DNA, 233 bp, Homo sapiens
aagatatttttaagtcagagcacagggcggttcagttttcattacccaacttggcattttcctcttgtccacagagcagctctgagcccttatcatggccctgtaaccacatcctctgctgggtccaatgcgaaatcaacactgtcagtgaaaaacaaacactaacaggtgtgcagcacattgagcgagggagggcgtttattctacagcaagggtcagtaaactggagggaa

SEQ ID NO: 2576 - DNA, 300 bp, Homo sapiens
cccagtcagcgccacaaactccacagctactgcctcctggctcacactgaggtctgcgccgcccccgcgccacccccgcgcccattgcctcggtgcaagcgaccaactcacctctcggagccgacaccagcagcgaagccggaaagaactgcgagcggaggcctgtgggaaatgtagtccgccgatgggagggactggttccagccccaacgggctgcgcggagtgcgcatgcgcgggggccggagccccgggtgcgctcggggcgggaaggccctccgcgctgcgtggggctgaggcga

SEQ ID NO: 2577 - DNA, 140 bp, Homo sapiens
aaacgtggaagggaggcgcggcctggggccggtggcgctcggctgggggccgcagttggctcccctgggggctctgggcggcggcagctcccgcctgtggggaggagaaggagccggatgggcgggttcaggcgcgcgcg

SEQ ID NO: 2578 - DNA, 133 bp, Homo sapiens
ccagcggcccgctcacgtacccagctccaggagctccttcacgatggcttttccgatgcccgtggccccgccggtgacgatggccacttggccctgcagcaaaccaggcgccaggtagctcctgcccttagcc

SEQ ID NO: 2579 - DNA, 147 bp, Homo sapiens
gtccctcggggctccgtgcgcagggcggccgcatggtgctggggcgcgcggctgggggcgctggcaaggcggctgagggcgtggttcacgcgtcgccggctggggtcgccctgcaggtgaaggggctctcgggcgcggccgccggag

SEQ ID NO: 2580 - DNA, 234 bp, Homo sapiens
cactgtagctgaagttggaaaggcaaagccttatggaagcggtttgggaggctcagcaggtcgtccgagcctagcggacgccctgagccagctctctccgccgccgccgccgccgccgtgggccgggcccagctcttataccgagtcgggggcggagctccctgcgacctccgactggggccgccccgtccccttcagggccgcccgggcgtccccgcggcgcgagacgagctc

SEQ ID NO: 2581 - DNA, 150 bp, Homo sapiens
agcacagaaatcctacaaacttctgtgggggctgcggttagaagcacaggctgtgtgaaaggtgactccgggggctacgaaaaaacacgaaggttttcacatagggtgagaacccaagacactggagaccatgaagcaatcttgaaaaag

SEQ ID NO: 2582 - DNA, 155 bp, Homo sapiens
attgagtctgaacccccttctctgccgatgcactcttctcgcctagcaacgtttacacgcggttaacctgccgcgcggggcgacagcagacacgaacccaggccgaacctataaagaagacaccgtggcgttcagacccggctcgggaagccgag

SEQ ID NO: 2583 - DNA, 158 bp, Homo sapiens
taccagaaatagtggttagttctcacatgctgttctgcttcagcgagcttcatgtggccacctgcagaaatagttcttggtttctcttccttgtctagatgctggtcaaggcagcgtttagaaaaacacagattttcatattcccattcacacgtgca

SEQ ID NO: 2584 - DNA, 255 bp, Homo sapiens
acaccgcgcgcgacgtgcaggcgctaccaactgactgcagatcgctggtgaggggcgagcccatgttcccgccaggcgggcgtcgggctagtgggcaggcgtggcttccggctagagggtcgtggaaggcgcccggttttgctgcgcgttcacctccggtcccgccccctcacggggcgggttttcggccccctattgcatcgggacatcccggagttttagaactcgcggaggcccaagtatctcgaaacgggg

SEQ ID NO: 2585 - DNA, 146 bp, Homo sapiens
gcctgcaagcccatgacgtggcgacgccgaccgagacacaaagaccgaggctgagaccgccaggggttgagggtgaggccgcgtcccggggccgctggagcgcgggcgtcatgcgagactgtcccggctgcgcgccgccccagagg

SEQ ID NO: 2586 - DNA, 165 bp, Homo sapiens
aaacggggcggggacggaggagcggaccctctggatcccccgaccctggctgaaaggagacaggcttcaccacgtgaccgcccccaactccagcccccgcagtctgcgcgccaccggctccacgggctgacccccgctctctaccctggctctctcggagctcgc

SEQ ID NO: 2587 - DNA, 136 bp, Homo sapiens
tccagggtctggtgagccgaatgaagggagtgagggctgaggccaggatctgggcagcaggccagagtccaggcagcaggaaacatggcagtgtctagacaggggctgtcagaccccgaggtcagggcactggcca

SEQ ID NO: 2588 - DNA, 140 bp, Homo sapiens
ggcggcgaccaccggcgccccaggctgggggcggagacttccgcgcgggcatttctccacccacaggtggcggcgtgcgcgcggccccgttgccatggcgacgctcctgctggcccagcaaccgccagactcgcacccca

SEQ ID NO: 2589 - DNA, 213 bp, Homo sapiens
ttttcactagcaagattgagtctatcgatttgtcaggccagctcagtgacaagactggaaattaacttagaggtatatgggagggttgttgtctgcagggtgttgaactgaggctaaaaataggtggggattcctggggcagcctccttcgtggtcacaggcaccacaaaaggaaaactcagcagggaaatttgctttcgagccctgcccaca

SEQ ID NO: 2590 - DNA, 144 bp, Homo sapiens
atttcccgccgcggccttccgccctgtcagcccgctcggccttctgtcttcagtcagcctgccccgaacctccttcgggccttcaggctgcgccccctcggctttgtcatcctgccgcctttcaaaaggataacacttaccccg

SEQ ID NO: 2591 - DNA, 179 bp, Homo sapiens
caggacaagctgactctggtggcaacgttctccagtctctgcattttcagctcgctgtgtgccaagagagggctggcaggtaccagcagctttcactttcattaggaaccgggacgaataatccaactgagctgcctctgcaccagaactgctgggacgtgaagactctccctggctcc

SEQ ID NO: 2592 - DNA, 830 bp, Homo sapiens
gaaagacaagatgggtgagcagctgctttcggctgaaaaccagaaagaaatcccagtgtttttgctttattttggtttaaaaatcaagtcgtatgacaatggaaacattttcctggttgtcctctcctctctgcccatgttgacagaagacggacttgctaattctggctggggtttttccctgcctgggctgtttttctcttttatcttcatcaattgaagagggctgctgtgtctttcaaactgtcggaaggtatctgtatttttttttctttcacataattctgtaggtcttttcccagatatgtatttttctctctaacttctaactcgctgaagtttccgcccatgtgacttccagcgtgagttaccagaaaccacaagagagagagagagcgtgcaagccccaaagcgagcgacatgtccctttggggagcagtccctctgcaccccagagtgaggaggacgcaggggtcagaggtggctacagggcaggcagaggaggcacctgtagggggtggtgggctggtggcccaggagaagtcaggaagggagcccagctggtgacaagagagcccagaggtgcctggggctgagtgtgagagcccggaagatttcagccatgcctcacagctccgacagcagtgactccagcttcagccgctctcctccccctggcaaacaggtagagtcctcctttttctctctcctaccttctgattctcctgggggatggaaagagagccaggcttccttgtcctgcccagggagctgaggatggaggaagtggctcgttgcacgggcactctgttagacttaggacatggaat

SEQ ID NO: 2593 - DNA, 891 bp, Homo sapiens
agcaccttctttccagaagtacctccgaattgccagggacttcgcccaaaactagaggttggtcgaagtgaaaatctaaacctaaggagaaggcagagagtgggatcccgtcacagtaggaaggtaaagaagacagaagtaaaggacagagcgggagagaaaggacaaaagttcaaaatacaggggtagaggagggacaggagccagaagaatggagcgatctgaaaggtgtacgtcctactcactggtaggcctgttttggactccgctgtgggagagggcggctgcacttctgcgtcccccgcctcacctgtcagacatccacacagccaggcctccccgccctcaccaagcccacacaaaccgcgccaccgccagcgtcagccggacgactctgggggcgtaggccgacaccgccctccctccagccaatctaatagcgctctcatgggcgcattcctgatgacgtttaggggtagggttagatgcccgtttccgctttcttcccacccacttccgggtctcctctgtttacgaatgtttgggcgcgaattactctaagcgcggctctcagaagggtgcaagaagaatcagtggtgagtcgtgatatccttaaccggctgggtggatctaaagttcagggatgagttttaaagccaacgcgtttgtggcagactccgcagtttgcatttgaggatagcgaggggggattgcttacggggaaatgcccgatgtcctaaaagatctgcccttaggatcctgagattgagatgtttgattaggggggagggagcaaagccatgaatacttcctatttctcccgaatcatcctcatggctcatcctcattgctaaatttctcccgcgggcactagtgaagtcaagtgcagcc

SEQ ID NO: 2594 - DNA, 132 bp, Homo sapiens
gtgaggttggagcgagcgctggcggaagagaggctcagcgcagggggcgcagagccggcgctggccaatatgcgccgcatgtgatacctttgagggcgcggcgggggagggtagcgtcaaatttcaaaaaaa

SEQ ID NO: 2595 - DNA, 266 bp, Homo sapiens
gcggccgcgggaagtggacattctttgtcaggaccctagcggaggtcgcgctgggtgtcgcctgtgagggggatcctcggtttctgcgcggtctcttgctttttttaggatcttgcgggccctttgggaaaaaggtttccaaatttttcctcaaaaaaaaaattatttttcctaccaatgattttcggtgcattccgccccaacgaaaagtatgtcctggcaaagtcagttccctaggaaccccatactttattttattttatttt

SEQ ID NO: 2596 - DNA, 280 bp, Homo sapiens
accacaagagggcagtagcactcaaccgttaatagggaacccagcagagcgctggaggctcattagaggaatcgttagagccggtcgttaacgcatcaacctctggaaaggacagggaaacaggaaccaccgtccagacactttcggagcttctgtctcggtaacaataacacaggaaataagcaacagggtcttgtgaaagacagcgacctcgctcaccatccccgtgtcgttgaatcaccatggagatggcgactagcttaataatggcttgcagatg

SEQ ID NO: 2597 - DNA, 156 bp, Homo sapiens
tccctccttcggccccctctcttgtcttccggagtgtggctggcggagctgggatggcggaacgaggcctggagccgtcgccggccgcggtggcggcgctgccgcctgaagtgcgggcgcagctggcggagctggagctggagctctcggagggta

SEQ ID NO: 2598 - DNA, 136 bp, Homo sapiens; identical to SEQ ID NO: 46

SEQ ID NO: 2599 - DNA, 78 bp, Homo sapiens
ccccccccccgccgcccccgcaagcctcctgctgactctccccgaccccggcggggggagcctggttatctcccactc

SEQ ID NO: 2600 - DNA, 135 bp, Homo sapiens
tctgcccttgagtagaagcttagaagtgttaatttgcaaaaaattggatgcagcacctggaaatagaaccgaaagagccaggttaacctgactttgagcttgttctacttttatgaggtggctgtacttttaaga

SEQ ID NO: 2601 - DNA, 246 bp, Homo sapiens
agcttgttgctttcattttcctgcctacgttggggcaaagacgtgttaaaagtgcaagaacagtgattattttgtggttagagcatgtgcacagtgtagacaaacccaggaaggagaatctgcttcatcaagtcttaagttgttatttagaccaaaatgtatgcgtaagcctcagatgactgttgatgtgccaggaaacttctgctgagtactttcggttctttcttctttactttacctctgcac

SEQ ID NO: 2602 - DNA, 350 bp, Homo sapiens
gtgcccgctggctggggtctgaggcggcttctctcgggtacgggaaggcggactgctgtgcagctgcgggctcgctcgggaaacccaaagtcacacgaaagcggcagcaccaccgcggctgggatatcgtctcccaacatggggagacaaaatggccgccacgccccgagccgaaattacatccgggctccgcgacacgcccgaaccacaactcccagaatgctctgcatcgacagcgggagacgagacgcgctcgggcgtcgctttgctgccgctaggccctgtgctcctccccgcagcggaaggcctacgaatacgcggtgtcttacgtcgcttcctccgttcttcgt

SEQ ID NO: 2603 - DNA, 142 bp, Homo sapiens
cagaggcgcggccggaggaaacgtcatggaaataaacaagggcggccacaagcacatggggtccgggaagcggcgggcgccaatcaggggcaggaggagtccaggacctgcctagcgccggccgcgcccgtctcccgagccc

SEQ ID NO: 2604 - DNA, 153 bp, Homo sapiens
gcgatggtcttgcttgcaccctgtatcccccggcagacgcccgggaactctactaagtgggtgaccccagagagctcgcccccacactccgactccgagtccagcactcggtccactgcacagggacctcgcgccccacagctgcgtcctctc

SEQ ID NO: 2605 - DNA, 356 bp, Homo sapiens
acttcccgcaccttcacttttcaaagattcccaggtgatgccaacctgctctgcggatggagcccctaagaccccaagcggcccagactacgtttcccagaggcctccgcggcctcagccacttccgcttccggtccagcctgtctccgcgtggtgcgagcgctgcaccagcccctggctggtggttactgtccgaacggcgtggtgtggtcgctgactctctgggcgtgcagctccgcagccctgccggctcggttcggttcgtgagcggccggggtcaggctgggtccctgaagcctcgagcccctggcgggtgctccccgcctttcccaggggcgggtcgaggggcgagccgg

SEQ ID NO: 2606 - DNA, 209 bp, Homo sapiens
ggatgggtgtgtgctaatcgcaggccaacaagcccagcgcggtacagaggtcccattgtgaccggaggcgagaaaccccgcctcggcaccctgacgcagcgcaggacccgccccgcgcgtgacgccagcgtcaggccagccccggcatgctctgcggccgcccgcggtccagctccgacaacaggaattttctccgagagcgggccggg

SEQ ID NO: 2607 - DNA, 144 bp, Homo sapiens
ggagcagcgctgggcatcccggaccaggcttcctgacgcacgtgttctgcgcgctctcgtgggaacccagcgtttccgactcccagatcccattctgatggcgccgggtatccctctgaccctcgagtaaaacctccaatggag

SEQ ID NO: 2608 - DNA, 136 bp, Homo sapiens; identical to SEQ ID NO: 569

SEQ ID NO: 2609 - DNA, 144 bp, Homo sapiens
gcgccgcgagaggccgctaggtggaaggggacttcggttccgcacgtcgtcatgttgttggatggcaccagtatgtgacgttcctaggaacttagctctgaggaaaaaacaaagcaaaccggggaagtacgtagccttgaaccg

SEQ ID NO: 2610 - DNA, 142 bp, Homo sapiens
gcggcgaggcggggtctgatgggcatggcaggcgctcgctcgctcctctctcgctccctcgttcgctccctcacacgcgcggagggaggcgaagcccgcagcagccacttcccaactttccaaacttcccagcgcaactttt

SEQ ID NO: 2611 - DNA, 146 bp, Homo sapiens
cgctcggccagcaacttccccgggcgctgtggacttgaccgcgccgccgccgccgccgctgctccgcattctcaacagccgggcggcccctgccactcgcacttttgcagacctctgtcggagtctcctgcagccggaatctcggg

SEQ ID NO: 2612 - DNA, 318 bp, Homo sapiens
aaaagagtgcctgagctcacagcgttggcggggcgcagtgaggtccgccaggactaggtggaaggagagaaggaacgtccctctctgcaactcatctaagggcctgctcggaccccggatctcacagcgagaactaccgcctcgctacacccgcctttccccgcgccacccaacagctcccacgtctcatcctccgggagcggggcggggcgaagcggaagaggaggggccgacacaaccacgcccactagccgcgctccaaggccgcggcccacttaccgcgagaacgcggagtcctgcggatggcgcacgcgcaaa

SEQ ID NO: 2613 - DNA, 154 bp, Homo sapiens
gccatcgcgccttccccggcctcctcaggctgtgccggggccggctcccgcctcccgcggcctacctccgcctgcgggacgtctctgtcaccattcgccgcgcctgtctgcgggacactgctgtctgcgggcagcttggacatctcagaccgtg

SEQ ID NO: 2614 - DNA, 146 bp, Homo sapiens
ccctccctaaggccccaggcagcacggcttgcggggcgatgtcccggctccaaatttgcagcgaggcccggaaatcggtcccgttagagccgatttcacccgtcaggaatgcgttccgcccccgccgcctccccgcggcaaccgcc

SEQ ID NO: 2615 - DNA, 146 bp, Homo sapiens
tctgcgcagtaagcagcgatggacccccaagctcctccgtaactacggaaagcttcggtgaggggccggcttccccgcacctcagtccatgcgctcacccgccaaggaatccggcgggaaggcaacagcctcccaggacctcgagc

SEQ ID NO: 2616 - DNA, 154 bp, Homo sapiens
cgctcggagctacttgcccggcggccgaggctgcggcggctgcgagtgtggcggtggcggcggtggttggagcagtggccgctccgcccctctccaccagggctggaccacacagccttcgcccggggccctaagcagccaatcactcgggcgc

SEQ ID NO: 2617 - DNA, 140 bp, Homo sapiens
ggttccaggaaagcgacgagcttgaagctctttgcacatgcacatgccctgctgtctacctgcagtgctcttcccgcgcacggccacaggcctgggaggccgtccggttaagtacccctcctacggttccgattctaccc

SEQ ID NO: 2618 - DNA, 153 bp, Homo sapiens
ggccgcgcgggggggaagcgggagaagccgctcttcctattccactcgcagtctgcgtgtgggggaaacgagtgcccggcgtatgaaacgcctaacttcgcgaaataaagagagacgtataaaagttcaagaattctgtccagactcaagggc

SEQ ID NO: 2619 - DNA, 139 bp, Homo sapiens
agcgctcaactcatacagcggccctggtgcgttctccttcccagccaacaggcagcccagacacagccccctcgcgcccggaggtgtccccgctccctggatccccgactgcctgcctttgggggtcctcctcagctga

SEQ ID NO: 2620 - DNA, 152 bp, Homo sapiens
tcctaccctctgcctgacctggtccggaagcgctgtccccgcctcccgcatagctgctacccgccggtgcagcgccgccgactgatccaccagcgactcggcggccgcatcgtgctcccgtagcctctccagcagcgtcttggcgtctgtca

SEQ ID NO: 2621 - DNA, 370 bp, Homo sapiens
cgccatgttcgcccggcaccggcgtcacgtgaagtgcggcgtcagctgagcccctccgggtgccaatgcatggggcggggtaagggcggggcagggggcggggcatggagtccttgacccacctcctccagagccaaattccacgggacgggaaggggcggtacctggggaagggcggagccccgatggggcggggctcccggagattgggggcccaagagctcggccaggataaatgagcgggctgccggctgcagacagtaggtcgggttagcgggcagcatctgcagccttttcgtggtgggagggaggtcctgaagcagaggacatcttgattctggttcagtccccgatctggcgtaccagccca

SEQ ID NO: 2622 - DNA, 211 bp, Homo sapiens
acggctgacagcgccccaccccaggaggaggcgggacttcctcaccgcagagtggctgcttccggtagaatccggaagcctgtacggagaaggggcggggccaaaactgcgcgcccaatcggggtgacgctctagccttgccggggactcgtgggtaacttgcttttgggagccagcggtatggcgtcgggctgcaagattggcccgtcca

SEQ ID NO: 2623 - DNA, 296 bp, Homo sapiens
ccgggcgcccccgctccggggccgctgaggcggcagtagcgacctccggaagcgaagacgggcaaggcgagcggcccgagcccaccaccagccgcctcccatgattcgcactacggccgccgcgcgccgtaccgccccaccggcctccggtaggttgcaacccatgtcactcaggatgaatggcttacccattggctatgcgctcgccactcaggtccggcgtgaactgtccattggtcggaatggcagtgattccctcctctgtcatctaggccggtagtgcccgtccctccttg

SEQ ID NO: 2624 - DNA, 181 bp, Homo sapiens
tgaggaagaggagtctgtgggtaacctggaggtcgacagaccgggaggaacgctcgagggagcaccaggcctgttacaacgagcgcgcgccgacgcacgtctccacccacccggcgcaaccgccagagcgcgctcccagcaaccgcggctctcgctgcgtttgtagccatacgtcacggcc

SEQ ID NO: 2625 - DNA, 109 bp, Homo sapiens
ggggctggggctgggccgtggggagctcccgcaccctcggctgtcggggcgccggctggcttcgcttaagagtgcctgaaacaattacgttcacgcctactttcaaaaa

SEQ ID NO: 2626 - DNA, 146 bp, Homo sapiens
gccgccagcccgggaggaggcggtgctaatctcagggaccggagacacctgcagcggccgcgagcccggcagcggcgacatcctcgagtccaggtactgcagagcgctggcccctgcctctgccgccgtgaccaccgtcacctccc

SEQ ID NO: 2627 - DNA, 222 bp, Homo sapiens
gtccgctccctcctgcgtcttaccgtcctggacaaagactccaagtcgaaggagacaaagcttgtaacgcaatcacgggaatcacgcagctgactgcgtcgcgcaccaacaacaaaatggagctgacagctgctgcgtcgagactcgtctcgaaaacactgatgacgcagcgagcgcgtctccgccgcggggcgggtcatgcacggggcgagcaggcggaaa

SEQ ID NO: 2628 - DNA, 149 bp, Homo sapiens
acacccgccggcgcctgcctccgcccggatcgcccagctccgcgttagccggagctgcacgcggggctgccggggcggacgctgctctgcctgcatccggaggcggccgccagcggatttgccacccaggtaggggactgcgttgctcg

SEQ ID NO: 2629 - DNA, 130 bp, Homo sapiens
taggtggtgtgactagcagttcgcaatctgacaggagtaagaaaaagttgctacgagaagaatgactcagctcccagccgagccttggtttcaccagaactgggcctttcctggacccagtaatcctgtt

SEQ ID NO: 2630 - DNA, 316 bp, Homo sapiens
gcctccatctgtccgacaggcacacagagcgccgccaggcacggccctcattcttcaccccgagctcccgcaaggtcggcgaggaggctggagcagcgggtaggaagcgggccgaggctcccccgacgctgggccgcaactgtcatcgcagatccctgaaaaacgagctctgtaatcgttgccgtcagcgggtgtacaattgcagccttatgtttcctgccgctgtttaccttcctgagcggcgcccagagatgcacacacgctgccctgaagcgggacgtgacctctgggcacctgtgaggtcctgggtgagact

SEQ ID NO: 2631 - DNA, 140 bp, Homo sapiens
cggcgagggcttcactgcgcgcttcctgcagccacgtggctgcggccgggaattcagcggcccttttccctcccgaccgggacccaggacccctgtccccaccgcgccttacctcgcggtcctcccagagcggggcgggc

SEQ ID NO: 2632 - DNA, 151 bp, Homo sapiens
catctcgtctctgtccctgatctggggtgattgggacttcggtgtcgctctttttccaaagttggagggtcgggagcgccgagacaccctggcgaggaggaggaggaggaggagggaggctgcgctgagccgggtgcaggtgcgctcacgt

SEQ ID NO: 2633 - DNA, 163 bp, Homo sapiens
gcgagggctccagggtctgcatcccctgaccaggggcctcaagaagctaagcccccttgcaactccctctcccgccccacgcccaccctctccgcctacgtcggccatcagagcctcgctcgctgcccgagagcctcgcattgacgccggcccgcgcgtgagt

SEQ ID NO: 2634 - DNA, 138 bp, Homo sapiens
cgtgacctcagagagttggaatgcgggcagccgcgcgggggaggcgcggacagctgcgcccggccgccggggagggggcgcgccgctgctttttttaatcgtatgaccacttattttaagagtttccaaataaagcaa

SEQ ID NO: 2635 - DNA, 130 bp, Homo sapiens
ccgagagggatttcgattggtcggtcagagaggttacctggaaatccaacaccgcccaacacccctcccgctccccagtccggggacttcgataggtgagtttggtgtagaaaacaaatctttcttcagt

SEQ ID NO: 2636 - DNA, 150 bp, Homo sapiens
ggtcttcgacgcgctggagtcggagcccgagctgatcgagcggcagcggctggagctgcggcagcaggagctgcgggcgcgctacaacctcagccagggcggctacgaggagctggagcgcgtcgtgctgcgcctcaagccgcacaaggc

SEQ ID NO: 2637 - DNA, 138 bp, Homo sapiens
aaaatcattgcgcagcctgtcagctgattggggtgaatgatcaatgtaaccggaactaaagttgtatgacatcatctttgccacagcttcacgtgacaaagctcacttcaaaagtgcttctttctcagacaaagccct

SEQ ID NO: 2638 - DNA, 269 bp, Homo sapiens
ggctgagggctggggcactgctggcaccgtctcattttatgagctgtagtgtgacgcatcagaactagacaagacggctcagagaagcacagtggtggctgcgtgttaccatacactccatttcctcttaggacaggacaggaaactgaggtttccaggagaaatgcccctccccttttgatgttacatgggagggaaaccaggctgccgaggtgtgacccccaccccatgcgagtgagcagggctgcgggtgattaaaaggttaagag

SEQ ID NO: 2639 - DNA, 681 bp, Homo sapiens
ccggcctcctgcctcctcacttcatcccggccctgacgcagccgcttcccagcagagcttggctgttccttgaactttcagtgttggttcgatttcctccagtggtaccacatgctgctgtgcaaacagagcacgtggtcccgccaaacaaaggaacatgtgtgctgcaaaccatccccctatcacgggagcgcagagctccgccaggagagggccgggcctgcgcactctaatttttcactgcagtttaaacactccgtgaggctctcaggaagcggcgggggtggggggcggccggagagaaggggcccgcgtctccgccgcttccatcaccgccctggaaatagcatctgaacgcgcacggcccgaccaggcttcccccaagctgctaagatttcatttcacctccgacaggcttcatggggactcgctgttaaaagatcactctcccgggatgctgtcgtgggggagggggcccggcactgtatacagctgtcaaaacgtctccgacaggagacgaaggcacatctgcacaagcctgtctcaggctgcggggcacacagggagcgcctcaaacctatcagtgtaatgccgagcggtaattgcattaggattagttatctcctgtgctctgctcattagcccggaggatggctcgcatccagcgagagggtggcacag

SEQ ID NO: 2640 - DNA, 436 bp, Homo sapiens
cctcagccgcagccgcagcggggccgacagtaagtgcggtgcgggctccggtgcgcgggcaggactcaggggcagggacgccccaggggcgactggccgggcggggtgcccacctctcgcgcgtgggcgcctccgggagtggtgtggccgccggtcccgccgcccgccacgctccgaggcgtcgctgtgcggacgcgggggaggcggtgggagcgagctgcgggcgctgcgcggtggccctgctgtctggcgtgtgcacgctagtgtccacacacgtgtgcgtgggctctgggtgccctggcgcggccggcacgcccatgggggccggggatgccggggcgtctgcggagagtgcaggtggggtgcgtgcgtgcagcggggcggcgcggcgctgcagcctcgggatggagcgtgggcgcgcgggtctttgtgcccg

SEQ ID NO: 2641 - DNA, 145 bp, Homo sapiens
ggccttgggcttggagggggaggatgccgacgatgccgaccgcgcatcagatctcgccgggaggagggcgcgggcgctccacttgttgcaaagaacgccgggttcctctgggccattgggctgccgctccggcggggagcgcgga

SEQ ID NO: 2642 - DNA, 453 bp, Homo sapiens
gcttctgcttcttggccttgacatgcagcgccaggggctgcaccgggtgcaactcgggcctggaggtggcgccgtctgacgctgtcggcggctgcaggagccgcaggtcgggcctgaactgcaacagccgcgcctgcgcggacgaggcagcggcttcctcgttctgggcctgaggctgtggtagcagcaacacctgctctggcttcacctgcagcagccgccgcaccgcgggctgtaagccggacgccactgcctccccgcacgacgaggccaaggtcgcactggctgccgcgctcagtgtgggagacgacggagggggctccatggctgctgcccaaaaggaggtgccctcgaccggcagcgggggcggagcgggacgcaacgggcgcggctgaggcggcggctcgggtctggctctctccatgggggagggggacgccccggccaggattg

SEQ ID NO: 2643 - DNA, 134 bp, Homo sapiens
acccacatccggcggccgcggcccccgcctcggagcagcgcgcgcgtgtgcccggggatgtgggtgcgcggaacttacgtctcggaatttgttccactgtccgacttccttgtcatactgagagattgtggtga

SEQ ID NO: 2644 - DNA, 277 bp, Homo sapiens
aacaactcacgatcctaccacgcaactcatcagctttgcttttcctccctacccatccctgcccggaggcactcgcgttgccccagaatcgctagttgcctacacacacaaccttagactctccactgtcactgtcttgtgctcaagtcaacgctgcagaacacaggaaacgggggctggccgggaaatccgcgcatccggccccagggcgccccagcctccccggctcgttgcagttaccggttgctggctcgaaagctttctcggtaccggaggc

SEQ ID NO: 2645 - DNA, 148 bp, Homo sapiens
ccgcgaggcgcggggtgcggggcccagtcccgccgaatggtggggagtgggtccctgccagccccaactggaggtgcgccgcgcggggtcagaagtgagggcgtccggagcgcaaatatctcgccgtttgtatttggtaggacagcgg

SEQ ID NO: 2646 - DNA, 324 bp, Homo sapiens
ttaaaggctaaagatgttggattgcctcccgcggccccctgatccgcattttatccagagaatacaaataaaatccagagagtaggaatcctcagatcctactctgattctttgaaatgaagagcccagaatgaagttggagacgtgttacttctaagatcgaggctaaatctctgcttctgtggcgcattattttctgtagagggaatggttctctctacagaaaatgtagagatggttcagactcctgtctcaccaagggaacagagaaggctttatacctgcgtagagagtgcagaagtcctcggttacagtcacctgtga

SEQ ID NO: 2647 - DNA, 430 bp, Homo sapiens
tgcgattaaaaatgggtataaatatgaccgcaaaactgcccttcaagcagttgacgagcgactttccccttacatcaagtgcacagtaagcccaagcgccggggccgcggggattcccgccagtcactcccgccactaccgccacccggccccgccgccagcgcagcccgcagccccggcaagcctgcgcccgctcggccccggtctctttcgctcaccagaggctacggggcgcccggccccgcacacccaagaaacactgccaccgcgacgcgcctgcccccaggatcctctcgcgagcttcagtacccaaggaagatgggccgtcccggaagtgcggccggggcgacttgcaggcccctcgccgaccgctctaggaatctcggaggtcttttgacctcgacgcctccttacctgggtctcctacatc

SEQ ID NO: 2648 - DNA, 132 bp, Homo sapiens
tgagaaaggcctgtgccacggtgctagactgcgcatgcgtcggcgactggcggccgggtttgagagcaaagcgcgttagccctgggcagctcctgccgggctgttctgggatccttagtgaaagttggaact

SEQ ID NO: 2649 - DNA, 169 bp, Homo sapiens
gaaaagtgaaaccatgagtccaaaacgtacctaggttggtcaagggagaagagagtttgctgatggatgacaatttcctgtttcttttctaaaaaaaagaagaaaggaaatctttacagatgtctgccaagacgcagctgttttcaaacaggtttatcttatttagcca

SEQ ID NO: 2650 - DNA, 146 bp, Homo sapiens
tggtcttggatcaagaatgaggccgccttcccgagggcgggcgcgcccccaggatccccccgggctcgggcactgccgccccgggacagtgacccgcccagccgagcaccctcgccctgcttgccgcgaccccgcggggtcactga

SEQ ID NO: 2651 - DNA, 148 bp, Homo sapiens
tgggaaattcagcctggggagcaaaagacccaggaccagttgtagcaaactgaactcaagaaggagagacgaggcacgcgctggtctttcccgagggggcagtacggtccccacctcccacgcgtcgcgcgctcccgaccggagcggg

SEQ ID NO: 2652 - DNA, 267 bp, Homo sapiens
tgacaagcgaaaagccttgaggtaggtggatgctcccaggaaactcagacgtccgaagttcacgaggagttgggtcgtgagaggggccagacctcgatccgcggggcgacagctgcagtgtcgcgtcgcgagcaggagcttggcggcgtagagcgccagggtgccaacttcgcttccaggcctgtgggttccgcccggcgcgtgctgctgtcagtcaacgccctcggcccgcccccgccgaagctccaccaatcgtagccgggggtc

SEQ ID NO: 2653 - DNA, 148 bp, Homo sapiens
gagtcggtctcgccaaagtgtgccagtgcgcaccgaggaaaactaagccgacgcggggtggaaataaataacaaccaaacgtgcctcgtcgctgaaccaggcgacttcccctctagaacgacagctgccgaagaaagcatctgccaca

SEQ ID NO: 2654 - DNA, 152 bp, Homo sapiens
gcgcatgttttcctgcagctattcctctcctctagcaatagtcgaatggctctggtttcctcttgcgcccggcccagtttttccgttttagcttcggttgtcataggctgtgctgtcgctttctctgggaaaggacggtgaagactggacgg

SEQ ID NO: 2655 - DNA, 146 bp, Homo sapiens
accccacggcagcatctgggggtgaatgcttacagctcctgaagccccagtgggcgtgtgtgacgggggctctttcagttttgccgtctgtaggcggcttgtgttcatcagctctattagaccttctgcctcatcacaagcacaga

SEQ ID NO: 2656 - DNA, 147 bp, Homo sapiens
aacccgtttgtcaagcccgtcgggtccgacgccgggggcagctccaggatctggcctcgtgaacgcgtgcccccaggcgtggccctcgagcgcagcgggtccccagggtcccctccgctgatctccactctggacccggctcgcgag

SEQ ID NO: 2657 - DNA, 146 bp, Homo sapiens
aggaggagaatcgcgacgagaagggtactcaccatcgggcggggcggtggagctggcgtgcggatttcaggcaaacgtttacctttttgctgtctattgcaaccgcgccgggctgacttaagaagcaattctgtgctctgtccaga

SEQ ID NO: 2658 - DNA, 171 bp, Homo sapiens
aggaggttgaggggtcacccgagtgctgggagtgacgctggaggtatcggcccagcgatgctggagtggtcgggtcggaggcccagcagcgtctggggaggggcgtgggggaggcgtgtccaaggccggctggccccgccccgccccgccgcctggcctctggcccgctgg

SEQ ID NO: 2659 - DNA, 148 bp, Homo sapiens
gcttcctgcgcgctgcctgagcccacaccatgaaggcgttcatgggccgcttgacgtgcggcttgcttttgctggcgccgttgacgcgcacgggcatgggcaccagcgtccagtcgtagccgctgagcacctggctgacggcctcgcg

SEQ ID NO: 2660 - DNA, 261 bp, Homo sapiens
ccattataaagtgcacggagtgggaggaggaatagggacattttaattgtatttctaaaaagtatcttctgtggtgaatcggaaacaaaactcattctttaccacaggcagtttaagcgctgcctgaaagatcgaaggacggtaaaccacagacgtgagaaacggaactttgcgaaaacgcagtcgttttatgtaccggctactcattggagttacaccagagactcactactggagttcatcagccaatccaaagtccaa

SEQ ID NO: 2661 - DNA, 140 bp, Homo sapiens
cccccgcttcacccccaaaattgataactagacccgaaggcattctagatttttcatctcagtactctgaaagggtcgtaagcttaatagccttcaagaaaatggctgccctcttgccgcgggagtgtgcggaccaaacc

SEQ ID NO: 2662 - DNA, 167 bp, Homo sapiens
ctggcggccgcaccttgctgcctccctcttgcagctctctgacgatgcagcgaccgcggctggcggagattgagcaacggggaaagggtgagggaggggttgcggggcgcgcgtgtgcccggcgcactgaagctggcaccgggagcagaggctgcgcgccgccctgg

SEQ ID NO: 2663 - DNA, 388 bp, Homo sapiens
tcctgtgtctttatttctacaatctctcgtctccgcaaacgaggagaaaaacccacagacccagtagggctggaccctacacgacgcctctccccctgtgcccttgatgggtggcccgcaggggacgcggccgcactcggtccgctgtggtcctggagcagccgcgtcctggctggcggcatttaggaaggacaaactccagaacccagggctccaaaggaccaatgcatgggaaggtcgggaggctcaggggagtgaccccgcgtctgggccagcgctttgaggcccctgtggacccagtggagagggcccgggtgaggcctctggaggcgctgaacggggccaggagccgtgggacgcacagagggcgccggtccctgtgggcaca

SEQ ID NO: 2664 - DNA, 135 bp, Homo sapiens
acccggccccagcctagccctgacctgttgcgcgcgggggccgccgggaattgtagtttgtttacgagactccttcacatccccagtcacgcagcactaggaggaaacggactccacttcccagcagccctgctg

SEQ ID NO: 2665 - DNA, 146 bp, Homo sapiens
cccgcacccccagaagccgaggtccgagcagccgccgctgctttgggtggggggctgacagggctgcgcgcgtcgcgctcttggctggggctgcgcgggcccggggcgctgcgggcggctcagcggcagctgccgcgctctgcgcc

SEQ ID NO: 2666 - DNA, 312 bp, Homo sapiens
aggaaggaaggaaaaggagacaagggaagcagagaggaaggaagaaaagaaggaagggagggagggagggatgacattgcagctactacaggccggcattctgccaagagctttgcacgtgcccgctccctgaaccataaaagcagccctctgagcttggtgtctttcctgttctaaggcagaggggactgctgcttggggacgtcctttgatttgcccaggggcagagaactatcaagcggcagagccgaaaagacaagccagggtgtctgatcgcgattctaatagctctctgggagcagtggccccctc

SEQ ID NO: 2667 - DNA, 646 bp, Homo sapiens
agacggagcctccaggagcagaaggaggcgtcctctctttgggggccctggggagccactgcccgctctgggcctctgtttcctcatctggaaaatgaagggatgctgagcctgtagtgcaggcctcacagggtagaaatgaagttcaagaaaagaaagcaatttgagggtgctcgtgcctggttcttcctcagagggatgacggtgagaacaacggcaacagctacaggaaactgagccctcagaggccctgtgaggtagctgtggtttgcatcactctttacagaagaggaaacagtctcagggaggcccggctgcaagactgggtgacacacacagggagtgtggatctgggccagtggtatgagcacggtgccaggtggctcccgccactccctggggatccaagtgcggggtggctggggtgtaactgggggagaggaggagagcctcactgtccctgtcgctgacacctggcaggcggggagctttaaggtggccacccaggagaggaacccccagagagtccagatgaggctgcggaggcagaagaaggtgagtgagcctgtggcatggacgggccgcaggggatcagaggacagggctcccttccccgccagctggaggcctccatatcaagacagcg

SEQ ID NO: 2668 - DNA, 281 bp, Homo sapiens
gagcgctgagacgcggcaccatgtttcggggagagctctgccgagggcggctgagggccacctccccagaggcgcgaagccctgaggatgggcagatggttcttaagacggcgcccttcccgccactcccacccccgactaccaccacctgggtctgggaacccggtgagagcgcagtcggagggtcgaacgtttgtagctgtcaagtcgtagccccgctgcgcccacaggaagtgacccacccgcctgccgggtagtggcctttctgtgagccaggacca

SEQ ID NO: 2669 - DNA, 178 bp, Homo sapiens
aggcttttgagcaagtccgtttatgcttcttgcctattttgctttagcttgtggcttccggtgaaaacacgccttcttactcatttggctccttactgaggaataaaatatacgaattccactccgtagcctgcaaattctctacctgtctcatcgcctcctcactgttgcaggtagt

SEQ ID NO: 2670 - DNA, 159 bp, Homo sapiens
gattccaaacgacacatccaagttactgtttgaatcggcatcgagcttactggggcggggtcttcccatgatttccatccggtcttttgctttcgagtctcccactatgctcagtgccttctgttacaaaatatgcatcatttaaccatgttccagaac

SEQ ID NO: 2671 - DNA, 147 bp, Homo sapiens
accagccattggaggaggactggggccacccagatgattgattggacccattcttccaggagggtttcccggtggccctcttccatcgtcatcgtatctgaaatcagatgagtttccatagcttcttctttttttcaaatcttgccg

SEQ ID NO: 2672 - DNA, 352 bp, Homo sapiens
tgggtctattttgttctttgctaggcaccgtgcacaccaaaaacatgccgaacgtttgggtgaataaatgaatctaaattctgcttcttcctgtagcctgctgggaaggccagcgtggctaaaattgaagtcagaaactaacaatctggtggaaacagtcaggatataggatgaggcaacaagaagaggcttggtttggactctcagggtgtgagtgagtggccttacgtggaagtgcatttcctggtgctgaaccggggacttgcagccaggagagtctgtggtctgagaaggtctgagctgcctggggcatctctcctgtctgcagccgcagcacagaccacagacctgg

SEQ ID NO: 2673 - DNA, 181 bp, Homo sapiens
ctgagccagcgcctcagatggggcttcgcctggtctaggagggtccgcaggcccccgagtctctgggagaacagcctccggccacgccgtgcgctctcggtcgcagacacaggcgtccctgggtcccgcaggatcctgccaccagcccgcgggccccgctggcggaccacgggcgctaggc

SEQ ID NO: 2674 - DNA, 158 bp, Homo sapiens
gaggaagaggagctgggaggagaaacagacaggaaacctgggagcctcgcggggctgggctgggctgtcagagcctgcgcgatccgtcctcccttcccctcctatacggcttgggcgaccttgctcccgagggcgcatcccgcatctccctgactctg

SEQ ID NO: 2675 - DNA, 142 bp, Homo sapiens
ccatacaatgagcgtcagtggcgcgcagaatcgccgattgttctgcccgacttgcaggcggttgcggggagccgggtcgccctgggtcacgcacacgcggaagtcaactgtgtccaggaagcccaggaaggcccgggatggg

SEQ ID NO: 2676 - DNA, 123 bp, Homo sapiens
gaaggaatgccagattctggcgtggagagcgggggcagggccgccaagccaaacggcctgcaccttcgcagccagcctcgcctttgccagggggcggcacatgggccgggtgtgtgggcttgg

SEQ ID NO: 2677 - DNA, 98 bp, Homo sapiens
ggagctggccaaacacgcggtgtcggagggcaccaaggcggtcaccaagtacaccagctccaagtaaactagttacctgggtaaaagcgctaacgacc

SEQ ID NO: 2678 - DNA, 143 bp, Homo sapiens
gtttctttcgtgtaagtgaaacgagtctcccgtttatcctgaacaacctcagagagaacactgatagggtgtttttcgacccttttatcagctgtagggtctgggtctgggtttgtgtctgcctcctcctaccttcttatccc

SEQ ID NO: 2679 - DNA, 313 bp, Homo sapiens
ttgccaggtgtctgttctccgggtctctgggcctggaggcgggagtgtttcaaagcacttcacgctccgcggccccaccggctggctgcgctgcccgctgcggccggcaggggtagtccacggacaggcctggaggaggcgggacgggggcagggccgggaacctgggcaagccaataaaggctgcggcgcgcggctgcgcgggactcggccttctgggcgcgcgcgacgtcagtttgagttctgtgttctccccgcccgtgtcccgcccgacccgcgcccgcgatgctggcgctgcgctgcggctcccgctg

SEQ ID NO: 2680 - DNA, 141 bp, Homo sapiens
gggacggcgcccccgccgtgtgcgtggggcggggatggagcacgcgccctggagccccggagccaggtatcacgcgtgtgacgcgtgtccctgaacctacctgcgcttcttgtcccaactctaaaatgggaatgataagcg

SEQ ID NO: 2681 - DNA, 147 bp, Homo sapiens
tgggggtgagccaagtttctttcttagggtccgctattaagcggtagtggggtccagcatggttgtgagcgggtaagggtgatcgtagtcatggcttaaaaggtccagtcttgcggttcatgctgtcttcatatgttgtcatggact

SEQ ID NO: 2682 - DNA, 457 bp, Homo sapiens
acttaaatcttagcttagtcactttcctgcggtatgatttgaacacaattttctccgaattggcttccccgtttgaaaaccaacagcgtctgccctacagaactggtgtgagagtaaacagattaggaccaggtcagcaggacggagcatgcccagaagagagtagaaagtgcagttttgccaaggagagggaattgagaggagtattctagccgggagggcggtgggcaccccagcacacaggcatgaggaaacagcattgcttgggggagaagtctgaagtgactgggtgtttagttcagagatagagcaacaggaaatgaagctggcagaacaagaggtcaggttgtgagccactctgaggagtttaagtttccttttgccggccgtgggagagctttaggattctaagtagagaacgatgtatgtttagattgtgccctggaaaaaaaaatga

SEQ ID NO: 2683 - DNA, 173 bp, Homo sapiens
ttgcgcctgtgtcagctgtggcaggctgcggccgtgtgagcattctgtaatgcaacgccctcggctgtgcctccgaggcttgcacaggcctttgttgacaagcaatttctcttctagagtggggcgcttcctagtaaggcgggcatcttcaggaagtggtggcagaatggaaa

SEQ ID NO: 2684 - DNA, 132 bp, Homo sapiens
gcaagtggctcccggggcccgagacgccgccgcccgcccttcaccgagtccggtgactccgcaagcgccctcaaaacgcctttcctgacagaaatgtcccccagctcccacgtcgcgagcctcacttaaccg

SEQ ID NO: 2685 - DNA, 144 bp, Homo sapiens
cggcgactggctaggacgcactggaggggcctccaagacccagaaacttgagcccgggcgcgatgccggagcgccgcgcagtcgggccgctgcagcccacgcgccccggaaagtcgcccctgtggaccgagcctgcgcgatcgg

SEQ ID NO: 2686 - DNA, 279 bp, Homo sapiens
gccgggccggcgacggcgcgcggtggctctttttcctctccggggcaggcgcgggtgcaggcgcgggctggggaccgcagccccggaccgggggctcggccgccggcgcctccatcgcggcctccctcggcctcagcgagctgcgcgcatggcccaggcccgcccggcctcgacgtccctggggagggacccggcgcggctccggccgctggggctgcggctgctctcggcccacctcggccccgacaccgcgtccccgtcccaagccccgccgcgcgg

SEQ ID NO: 2687 - DNA, 132 bp, Homo sapiens
gaggtgggtggcacagaacaaagtcccccgggatgttccaaaagagaaactgtcgccaaattggcaggtgaaacacagcctgtcatcctcccagcaagacggcaccatggccggggcacagaggtcagattc

SEQ ID NO: 2688 - DNA, 139 bp, Homo sapiens
acaagtgcgccgagccccacgcaaagcacgagaggtagcagcagccgaggacccgggcccatggtgagcggtggcagcggcgctaccggcacgggcgctaccggcacgggcgcgacacaggctctgggacagctgacgg

SEQ ID NO: 2689 - DNA, 146 bp, Homo sapiens
aaaggctcggcctttccctgcccagggcggggaaccggggtcgtaagtcccctggggagggacacggacgggaagcagccgaggggggtgaaagtccccgagaggggcccagccactacagagaaagccctggcgagagaagagaa

SEQ ID NO: 2690 - DNA, 130 bp, Homo sapiens
ccgctcccggggactgggagaacaggatagcagcaggagtcggggggccgccgaagatggggaacactacctcgtgctgcgtgtcgtccagtcccaagctccggaggaatgcccactcccggctggagtc

SEQ ID NO: 2691 - DNA, 146 bp, Homo sapiens
cagcccaacaggaggatgggaaggagacttgtgtgggggcctcgggctggcgggtcgcgggttccttatcctccgccttggcgcctctccgcccaccgcccaccgcccctccctggcattggttggcgccaggggaagccgaggct

SEQ ID NO: 2692 - DNA, 151 bp, Homo sapiens
gttctccagcacccgctgccagcgctcagcccggcagctgctgctgctgctcgccgaacccaccctgaagcgacagcgccggattcgaggcaggttactctccaaggtgatcacttcctgattcgtcgcctccattacttcattcactccc

SEQ ID NO: 2693 - DNA, 244 bp, Homo sapiens
tccggggcggggcctgagatgcagtcctgcgagggcggcctcctgtaagacctcttagcgggcccatcgctgaggtgcagggacatgtcgcggccgaactcacctcgtggcctcggcgtggtgctctcagctcatgcccggaaaccaggtcccgacgccgcggtcagacggacctctagacgcgtccgcctcaatgccgccagctgccaggccgcccgtgacgcgttaagcctgcgccgcctcc

SEQ ID NO: 2694 - DNA, 155 bp, Homo sapiens
tgggccccagcactgcctgtttcagctgctacaggatctctgtatggagattcttctctatcttcacccgcacgtgacacgggccccacgacttccccatgccctgtggttgagggaaaccccaagctcagtaggccttttttggcctgtgcctt

SEQ ID NO: 2695 - DNA, 272 bp, Homo sapiens
gagaaaatcagacagtaaccggccattgaaatataaaatagaattctgaagaagcctggcacaagatctgtgctttgtagctaagaatagcaaggttaattacagaagggagtgacagaaacaggaaagcagccatcgcacaaaggagaagttgctgcagtggtagatctaaaataattggtagcaggagctggtctcagagttggcaaaacattaacccttgagggatggagtttggagcggggagaaattgagactgagagagagagaga

SEQ ID NO: 2696 - DNA, 143 bp, Homo sapiens
gccggggtcgcggagaggccgcggtcggggatcggtgggaggttgggaggcctggcctcggcgggatcctgggggcgggcgaggagatgagggccccggaacgacccagagttcgccggcggcgcctcgagccttcccgctgc

SEQ ID NO: 2697 - DNA, 328 bp, Homo sapiens
gagggatcctggaggtgacgtcatgtcggcacgcacagactgcttgcacagcccgctagcatttcagttactgttcacacctcaccaggctccacaaccaccatccagcttgttcacatttgtgtttttcaaccctaaccgtgttgcactaatttcctgttcacttctcagaatgcacatggccaaggagtatttctggaggaggaatgagtcacactggagctttcactgagcgggcgtcagtgctgtgggcagccgcgctggccctggtgctacccaccagcagcaccgggaggctgcttctctcgggtgccactccctgcagcgc

SEQ ID NO: 2698 - DNA, 148 bp, Homo sapiens
tggagactgctttgaaagctgaagtttgtaaatgtggcttagctggagaagtgcccccacagaggccgtggctctgagctgagctcagcgcttcacagagaggaagtagctttccgattccacccactgagccagtgcacttgcagca

SEQ ID NO: 2699 - DNA, 180 bp, Homo sapiens
gaaatgacagacactaccgacgccgacataactgcacgcaaggtactccagtccgcgccccaaactcttggaggacccgtcgaccacaccggatgtgctgtttgcgcatgcgcaccctcgtgacctaactccgccctccccggtgtgccaatttgcgcaggcgctgaggccggccagggc

SEQ ID NO: 2700 - DNA, 202 bp, Homo sapiens
caggccagggagccacgaggcggcgcaggacctgagcccagagaaacgacctggaaaggaagcttctcacagaatgcggcgcggacagcggctgccgagcaggggatctggaaagcactggcccctgagccccagcgcagcgcagggtgtcgcaggggttagcccgggtggcgggaagagcccagggagcaaggcccccccc

SEQ ID NO: 2701 - DNA, 167 bp, Homo sapiens
gtcagggaagggacacggtcagctcgtttgtcagccctgctggtcaacacctgcccgcctcacagggaggggctggcgctggcctcccctccggggcctgtttcccttggagccctttcccagagctgtctagagctccccacgagcaagccctgctcatttccttc

SEQ ID NO: 2702 - DNA, 203 bp, Homo sapiens
gcagggacagtttggcacaaggaggacggtagtggaagccacagagcacccgagaaaccactgctggggcaggaaagggaaccccatttcctgagtcccgcccagggagctgctgggggccggctcactaacccaggagtgaggtcatgccggcagcatcacggttcttatcttttctctctgatccaggacctggcctgtgg

SEQ ID NO: 2703 - DNA, 139 bp, Homo sapiens
gaaagagaaggggacgagcgggtggcggggagatggcagcttctcacagagagatttccaccttctgacgaatcccatgcacccagcaacccggcaagagactggttccgaaacctccgcgcgagcgccccctgggggt

SEQ ID NO: 2704 - DNA, 144 bp, Homo sapiens
ggcgcagttaaggcattgctactaagaaactcgtctctgagaaatatcggtggttggaaggttgtagggtgcttccaccgagaaagcgcctacccagtgaaatacgcctgtgacagaaaaaccgaggccaagccctgccagcag

SEQ ID NO: 2705 - DNA, 106 bp, Homo sapiens
ggaggggaggcgggggtggtagggaagacggagcacgaatggttggggttctaagcagcacgtccgatgaaatgtcttttgcctccttttttccccctttatttaa

SEQ ID NO: 2706 - DNA, 126 bp, Homo sapiens
acctgaagggcaaggtactgagggctccccaccctccctgttgccaggcaaccggcaggggcctccgcccgcggggacccaccctgttgctaggtaaccggcttatgagccccatcctggtgtgag

SEQ ID NO: 2707 - DNA, 147 bp, Homo sapiens
ctgcccgggtcccagtcacggtcgggagcagccgccgtggcccgggctcgcgaggcaggctcccgcccgcaccctcccgtgcgaggtccccgccctgcgctcccagctcttcgaacctctacccgagcttctctcacgttgcttgtg

SEQ ID NO: 2708 - DNA, 465 bp, Homo sapiens
ggcccgagcaggacgggtgggctgcggaccgcggtgggaaaagttgggggagcgcggaggtggcgcggaaatagaaggcttcctggaagcggtgacccttgagccggtcttgcccctcagtccctgtatccttttaagccagccacgctgacccctccgcgcctccctgaagccgttgccagcctgtctctgcgctcgccattccctccgcctggacctctccccactcaccacctcccgcccccatcagacgctgctttctcctcccagagacctccaagacctgccaagctgaggttgtttcctcgcctcgcccctcgcacgtttgttttctttcctgtagtttctcttgctgtctggaattgctgtttgagttactccgtgccttctttattgccttcttacccccgctagacacccagagcactggggcccggatcagcgatcttctccgcacctctggta

SEQ ID NO: 2709 - DNA, 162 bp, Homo sapiens
acctccgagacgcccggtgacttctgctggcacctgctgccctcggcatcacctccctcatccccctggagggcacgctggaaagctgcaactccccaccctccgcacaggagcgccccgtagacgcgcagatgggcccagccacccagcggggcggcagcc

SEQ ID NO: 2710 - DNA, 150 bp, Homo sapiens
tctggggcgctcgccagtaccctggcggcggctgccacttcggcccccgcccccggagcacccggcggcccccagctcgcgggctcatccgccgggccagtgactgcagccccatctcagcctcccaccacatgtagttcccgttttcgc

SEQ ID NO: 2711 - DNA, 100 bp, Homo sapiens
gcctcctggtaggcgccctggggccctctccctccccagccaccacctcagataagttacctcatcctcgcttcgcgttcttccactaaagaacctgggg

SEQ ID NO: 2712 - DNA, 150 bp, Homo sapiens
gcggcagggaggcagaaagaaaagaggtagcaagccccagacaagggatccttaattacagataaaaggcaaacaaaaccgtacaccacattttccacgtgtcagctgacggccgcgacaaaaggaaacagaacgctggggggtgggggg

SEQ ID NO: 2713 - DNA, 158 bp, Homo sapiens
gggacagcaagacccaggagcaaagaggcgtcaaaataaagtcttgggctggttaaagggaagttggcgtctgggcaaggaggcctaaagctgttgttcccacagaattttctttcagtggcaggcgacatgctgggctttgttgctctcgctaactg

SEQ ID NO: 2714 - DNA, 143 bp, Homo sapiens
ggaacggcctggactcccgagactcacccgactcgtggccacaccgggagaactgaagcggcagtagccggcggagacgcccgacccgaaggccggctgctagggagcagacagctgaaccgcttgccagacgccgaaaccca

SEQ ID NO: 2715 - DNA, 156 bp, Homo sapiens
tcttcagagaagcatgagctgtttggttagccgcagcagtagcaaccccattgcaggctgctggctttactaaaaatttcctttcctttttgtgtggttttaaaatgttgcatattgacgtagatgaaactgtggtttgcaagtagtttaacttta

SEQ ID NO: 2716 - DNA, 138 bp, Homo sapiens
tgtgggtagctggcattgccacgtacagagtaacttggacgtgacgcttcaccgtgaagtcacactcctggcctgctgggaacagtggggcagccctggaggagccaacccgatgaataacgttattggaggtgtcca

SEQ ID NO: 2717 - DNA, 110 bp, Homo sapiens
ccgcgggcctctccgctcgcccgccgcccccctgccaggggaaggagcgcagcgtgcgcgccgccaggaagcggcgctcgaaactctgcagcaagagttcggtccccgca

SEQ ID NO: 2718 - DNA, 145 bp, Homo sapiens
gctgcccggaggccgagaggcacgctctggagcaggcgtctgcagctccccagagcggaagcaaaccccgaaagtgtcgcttcggggacgaaatgcacagcagcctctccaagcaagggcgcctcccgcgaggaatggaggcccg

SEQ ID NO: 2719 - DNA, 211 bp, Homo sapiens
atttacagagaggaaaaccgagtctcccgtggataattgtgtctaattcatttgtcgcggacctggcgcagtcgctctcccccgcagccccgcctcctccccgcgggctcagggcacaaaaagcgcacacgcacacatcaaacgccatgcgcacgcgcacaacaaacgtcacacgctacgcacgcgcgtgctgtcccctccccgcagccag

SEQ ID NO: 2720 - DNA, 313 bp, Homo sapiens
agcgcggctgctcgctgctactcttgctgatgctctgcccctccagctccggaggggagcgaggagggggcggggcgcgcctcgagagtgacaggcccggctgccctatcaaagagccccttgggagctgcgagccgcaaccattggcgcctggggcgtgggcgggacggcagtaggtggggccgccgagtgggttgagcgttactgtggcagcgggcatcccagggtgcgtgcggtgcagggtgtgcaagaaaatgcgaggttggaggaggaggtctgtgtgtttttaaggattgtgtggagttgtgaggtg

SEQ ID NO: 2721 - DNA, 145 bp, Homo sapiens
gggctggtaccaacttggcggttctcggaggggcggggcaggggcggggcggggggaggggagaggacgcttgcagaagcgtcctcagttgccatggaaacgggacccagcgaagaacctagcggccgaaaagagtcccaggaaa

SEQ ID NO: 2722 - DNA, 140 bp, Homo sapiens
gctgcccggggaaagtccgggcagagcccgagcagcggccagggtaacgctgtcttgtggacccgcacttcccacccgagacctctcactgagcccgagccgcgcgcgacatgagccacgggaagggaaccgacatgctc

SEQ ID NO: 2723 - DNA, 148 bp, Homo sapiens
cctcccgcgggcctcgggggggcttcagaaaccgctcggccgagctctgactgccgggcgagtgaccaggagatcgctcgctctctaagaagcagctttgttgagtcataattaataaactatgatgagatttggggtctgatgtagg

SEQ ID NO: 2724 - DNA, 392 bp, Homo sapiens
tgaaaaattagcaatgctatgagtcatcgtgcattagctgcagaagagttttgcatcttgtacgaatccagacaccatatgccatgcgaaggcctattactttattcggtgccaccgctgacaggcagccacgtgggtatccccagcggaagggctgtctcctcccggcggcgaggacaggaacccagtgagctgaacacatccgacattgtacggagcagcaggaacagctggtaagctagcaagcggcaacggcccagcgaggagcgtggatgctaatgagcctggcgacaatgccggccttcagaggggtaagtgcaatgtcggccggcatgttcccacaacagcctcaagagtagaatctgctcgttcatgccttcagtctcattaaa

SEQ ID NO: 2725 - DNA, 316 bp, Homo sapiens
ccttctcacccctaaccacagtgggacgaagtgaggccgggatctccggaacccgcctctcgctaccaggcgccggagctgccgctcccgaggttcctaggagatgcagaagacactgccctgaatgcctacagccggctggcaatgccgccccagagcagagcggcgggtgccgcctcgccttcttataggctcgcagcacttccagtcgcgcgcgaggcctcctgggaagtgaagtccggagaccaggggtggccggctcccagcgcgccaagctgctaaccccctaactcccgttcctcctcggcgtttcttc

SEQ ID NO: 2726 - DNA, 278 bp, Homo sapiens
tcccacttagcatccagccggcgagaaagccctgctcctcacaaattgccttgtcggctcggagaaaaatgccagcgtgactgattgctaggtgggtccctccaagtgcgcgggaaggaaccggcacgaccgcacaatgctccttcctacagagacgcggcgtcgtgccagagccggagatttgagtcagacaccgggaaggactgcccgtggaggagggcggctcgtggggctgggggtttgtttaggggtctctcgggtccagagggagggccagg

SEQ ID NO: 2727 - DNA, 173 bp, Homo sapiens
ccgcgtcgccgactcacgcggctggtttcaggtttctggcgaggccggtgttcggctggcggctagctgggactagcggaacggcggagtctcgattggcagtgcctggacaggcgcaagggccggcgcgggctccgggcgctcccggcatccctcgggcggcggcggcggcg

SEQ ID NO: 2728 - DNA, 134 bp, Homo sapiens
acaaacaggcgggccaaccgccgcgacaaaaaaaagcccgcctcctccccgcgggcctcaggtggaatgctctaacgacagctcccaggcggcggtggaagaaacgagaaagtttcaaccgaaccttgctgttc

SEQ ID NO: 2729 - DNA, 193 bp, Homo sapiens
cccctccgcgcgtactgcgggccccacgggtgttagtggcgggggcggcagagtccgggtgggttgtcgcgacggagccgggcctcttcgccgtcttgagacggggctggcgagaagggcccctcacggagttgccatgggcgtctaaccgcggcagccaggcccctctctacgtgagaccccggcccccctc

SEQ ID NO: 2730 - DNA, 524 bp, Homo sapiens
cacccggcccgccgcgccgcgcccccggagtaacaaacggcctagcgcggccgggcttggggcctggaggcggggcgggcgcggagccccatgccgtgcaacccctgtcctagcccctcaccgccagctcctgcttccgcttcacgagctccgccagctcccgccgggtgtccgggatctgcggcggcgccgccttgttgtgcatcgccatgttgggctgaggcgggcggcggcggcgcgaggttgggggcggtccctgcgccgccagggggcgcccccccgctctgcgcctgcgcgcgcggcttccggagacgcgtgcagcgccgtgccgagcttcgctaaggccggggctctcgaaggtccttctcggagagctctagagatgcggcttctgctttctgccgtttcctgcccctcggctggccgccggctttacagacgccacaaatccaccgcgtccaaagcctagctcgtcctcaggcctccgagtctcctgtgcgccccgcttcagtccacttcagtga

SEQ ID NO: 2731 - DNA, 143 bp, Homo sapiens
cttggaaacaggggtccgactggcagcggagtgggggcagtccaagctccggggtacctgcaggaggagactcgaccagcgagaggggccagcgagggtgaccaggtgcccgcttggggaccccgccggcggtggccaggcta

SEQ ID NO: 2732 - DNA, 262 bp, Homo sapiens
gcggctctgggtcgccgccttctgcccccgcctctgtgaggcctctcgaggcagtgtctgtgtctggggcagcgacgccgacggcgctgggggcgcgaaggggctcacgctcctgcgttcccctggcgccggtgagtggcgggcgaggacagggtccgggagggggataggcgagagcgcttcctgcctccgcccgggcggggctcggccgtctcacctgcccccacccacggcgccgtcggatcccagagcggctggtgag

SEQ ID NO: 2733 - DNA, 133 bp, Homo sapiens
ttcagggctccccaccgatagtgatcggcagtgctgactgcaatgtgatagagatagatgataccctcgacgactccgatgaggatgtgatcctggtggagtctcaggaccctccacttccatcctggggtgc

SEQ ID NO: 2734 - DNA, 145 bp, Homo sapiens
cggagaggtcacgggtctcaccgcctcggtgttgaatggtccccgaggcggcgagggcccggcgttgcttctggggacgccctcctccgtctgtacttactcagaggaggggccccacgcccagaggcgcccgcagtgacctgaa

SEQ ID NO: 2735 - DNA, 240 bp, Homo sapiens
gattggaagccatgtggttctgacgccaaggcccggctgcaacgtgcccgacgggctactccgggctggcagccccgcccttcttcggaaagctgacttacttgcgccccctggtgtttcacatgctgtgaatctctcacgaccgaggtctggccgcgcgccacctctctgagggaaggacagggtcagtggccaggaaggggcccacttcagacgccggcgtaaacgaggatgcgcctc

SEQ ID NO: 2736 - DNA, 154 bp, Homo sapiens
cggggcgcgaggcggagagaccttcccctatagaaccggcagagggcggggcgggatctgtgagtctctcagcctcggcgtgtttttgggttttggagacgagacctgccaggaaagctgaggcatgattcaaaagccctggaactgtctggaa

SEQ ID NO: 2737 - DNA, 153 bp, Homo sapiens
gcgggtccgaggggtgggaaggcggcggcgctggaggaacaggtgccgggctgagcgctcactcgcagactagcgcgtgcgagggctcctcgctctgctttcgaaagtccctgggccgtgggagtttcccaggagcctctccgacgcgcgcag

SEQ ID NO: 2738 - DNA, 140 bp, Homo sapiens
gggtgctcgcttttcctttccagagggagggtgtgccgctgccaggggagcgcaatgaagtgagcgctgaggggccgagggtctgtggggaacgaatgggtgcactttcccaggaatggcccttcacggactgctggttc

SEQ ID NO: 2739 - DNA, 148 bp, Homo sapiens
gtgttcacacccctagctgtggtttttaaattgtgttaaggaaacggatcattttggttagtaggggaactttacctggtcctgtgtgtttgtttttattcttcgagtgctgacgggctagtgcaacagttgctggtaaatggctgat

SEQ ID NO: 2740 - DNA, 185 bp, Homo sapiens
tgcgggagacgcggagccggaggaggaggcgcagccgctgcccgagccgcagccgcagccggagcccgagccgcggggcgggtgcgaagatgcacacgacccagaaggacacgacgtacaccaagatcttcgtcggggggctgccctaccacaccaccgacgccagcctgcgcaagtacttcgag

SEQ ID NO: 2741 - DNA, 145 bp, Homo sapiens
gtgaccaggacagactgtggtgttttttaacgtaaaggagatccgcggtgtgagggaccccctgggtcctgcacgccgcctggtggcaggccgggccatggtgggtgctcacgcccccggcatgtggccgccctcagtgggaggg

SEQ ID NO: 2742 - DNA, 176 bp, Homo sapiens
agtctccagggccttatcattcctcacgctttccttcatcggctcgcaaagaaacgtggcgatcaaggaagacagcgaaggctccatcctcgtcgggggaggataattcgaatctcagcctgtgagtttactcagcacacctgtttaatctcttggtccttcagtttccacaccta

SEQ ID NO: 2743 - DNA, 282 bp, Homo sapiens
agacctcccagtagagggcccaagacgcgggtagagcaccgcgtctcagcgcctgagtctcagcccccgaactccaccgcacctgcaggtccccttggcagcactcaagcgcggggatgctccgcttagacgaactcacgtgcgggcagcaaggcctgcgatacttgagcacccctccccctctcccgtttacaccccgtttgtgtttacgtagcgaggagatatttaggtttctagaaggcaggtcatcgcaggccccacccagcagtggagagagtgagt

SEQ ID NO: 2744 - DNA, 146 bp, Homo sapiens; identical to SEQ ID NO: 125

SEQ ID NO: 2745 - DNA, 153 bp, Homo sapiens
acaaccacttttgatgagtgtggtttcatcagaggagagaatgcggaggaggaggagaactcccgcctcctccgaggaagcagcgccccttagtggtctgtctctcacacggcaatgtgcgcttgctctcttcagggccaagctataccaatg

SEQ ID NO: 2746 - DNA, 145 bp, Homo sapiens
ggccaggcggcccggctggcccgaaacgccacaggggcgcccctcgcgagactcctccggagccacgcggcgggcagcgtttgctgtgtgaagtgacaggagcccacacgcctccgcgtcctcaccgcgcgagggccccgccgtg

SEQ ID NO: 2747 - DNA, 590 bp, Homo sapiens
gttgggaagcgcagtcctaaaggagacgcaggttggagactccgctaagcggagaagccgcagtggggccatggcaagtcaccttccctttcgggcctaggaatactcattcgaaagatggggggactggagtgccgagtggctgtggcagccacgattggggtttggaaaccatcctgaaaggcccggggagccagtctcctggaacttctccctccccattcccacaaaaaccaagcgccctctcggccaattctcaccctctcaggacaaaaaagtgagatgagcccgtcctttcacctgcgagtccaagcccttggcagaggcctgaaaagtccgaaaactccgagttcgggcgctgaggtctcccgagccggttcctgaactctccgggcctcagtcgatcggggtgcggagggggccgacccgggggatctccaagcgccctccccgccctgacgctgtggggctcctaccgcgccgccacagctgctcctacctggggaggtgcgcccgggccccggggggcgggcagtcggggggcgggcagggaaccggtgccgccccacgcttcgtggcccctttaagga

SEQ ID NO: 2748 - DNA, 142 bp, Homo sapiens
tcctcactcggttctgggctcacctcgtctagttccgaagtcctgggcagtccgctcactcgagctgtcagcgcgtcctgcactgggaaaccagctgacttgccgacatactttttccacaccgcggatccgcgaacgtaga

SEQ ID NO: 2749 - DNA, 145 bp, Homo sapiens
ttccctgcttcaggtgccgtaggatgagttgtgtcagggaaaaagccccaagaaaaagctaagaaaaatagggagacgattcctcggggtcagaggtcagaatggagccaggaggtgaacccagtgtgctgcccccttataaggt

SEQ ID NO: 2750 - DNA, 138 bp, Homo sapiens
tggggtccacctccccggtccagcagtgctggggaggggaccccgcacgtgtgcccggagcgcggacacggtgatgcggctgcccctcgccccggccccaggctcgctgcgccctccctccccggtcgcctctgcgtt

SEQ ID NO: 2751 - DNA, 101 bp, Homo sapiens
gaggccgctgcttatctgctgtacggggcggggaccggccccctcatcctagagctgtcattggactgcggaaacccagaccttccaccccagccaatcca

SEQ ID NO: 2752 - DNA, 459 bp, Homo sapiens
atgaggatggtcggctgtttccacatttaagggcagagctgggtgaagggtggtgttagtgctcgagggtcacgcgcgggtggctttgccgcggtggtggcagcggtggcagaggcgacaccgctggaggcggcggagggacgggcccaccaacgctgcaggccggtaaggcgggcgggggctgcgggccaccaggtcctgccctcccaagctgcagcacgcgctggctggggggtcgtgggggctcccgtgggggcgcggccggacgcgggacgctgcctccgggaatggggctgctggagcgggaggatgcgctagaaccgggggtggggcgacgagggacttgggggcggggagacccgcgcaggacccgtgctatcctttgggattttgaggggcgggtccggcaaggccccccaaagtggctgctcctgcgagtctccgagaggggaacaggtg

SEQ ID NO: 2753 - DNA, 216 bp, Homo sapiens
catgggtttccttccccttacggcagcttcctgtgtggtttttgtttctttcatccctccgctggctctgtgtgcttttttccaattgtctagagagctagaaggtaatgactgtaaaaaaccaacgctacttgcaagcagggttgtatctctagatgttctctggacttcactccgtatctgacttcttatatgtgtttatcagtctcctgttca

SEQ ID NO: 2754 - DNA, 134 bp, Homo sapiens
cccgccctcggaaccggaagtagagcctggtgcctgggagcggctggcgcggcggaatccagggccgacccgggccggaccgaccccaggcggcggtgagcgagcgcggcgtccgcccggggtgcaggccgggc

SEQ ID NO: 2755 - DNA, 145 bp, Homo sapiens
cgtactcaccgacagcggcagcagcggtaggcccgggccccaccatgactcttcagtgacagtttttcttcaaacgccgcgcctgtagccaggaccggcgtgccgcgcgtccacgcgtcctcattggctcctgcgggtttgaaac

SEQ ID NO: 2756 - DNA, 138 bp, Homo sapiens
tgctgctgctgctgctgctcgggctgctggccccgggcgcgcagggggcgcggggccgcggcggcgcggagaagaacagctaccgccgcacggtcaacaccttctcccagagcgtcagcagcctgttcggcgaggaca

SEQ ID NO: 2757 - DNA, 156 bp, Homo sapiens
gcgtgtgggaacgttctgtgctatctcttggcttgagtcgggggtggaggacggacctcgttcacggatttcttaccgaatttctactttcttttttttttctaattggacactgaagccaaggaagtcagtggtcgcccggaagcaggatttgca

SEQ ID NO: 2758 - DNA, 359 bp, Homo sapiens
gccctccccgggaaggctgtgatttatacgcgcaggcttgtcacggggtgaaaggaagggccactttttcattttgatccaatgttaggtttgaaagccacccactgctgtaaactcagctggatccgcgggccgtgattaaacacattgcccgctttgttgccgagatggtgtttcggaaggcgctgtgaatgcacttccctttgcggggctcacacagacaagatgtgtgttgcaaggatgaggcgcctgctcggcctccagcccagggccgggaagggagaaggtgctgtgcgtcgctgcctgtgtcgcccgcggctctcctcccagcgacagactccagacctctatgctgtctg

SEQ ID NO: 2759 - DNA, 251 bp, Homo sapiens
taattagaaaaacactgatcttcagacgccactttggtttcctgatgagcagacaaaattcggtcaggggccatggaaggagccgggagcgaccggaccagggcgaatctgctgtctgtgccggcggaaggccagtaagtgccgtgcagtcgtgaaaaaggaagtggttaaagtggttacggcaaagcggtggcgccggctgctcccgacactgcagcccgagagggagagaggaggactgaaggcagtcc

SEQ ID NO: 2760 - DNA, 148 bp, Homo sapiens
aagccccgaagtcggagatcgcaaggtcctagcggcaacagagcctcctagcgatggcagcgagcctcgccccgcctgcggtgaacccgcccccgctcaccccgccacaggtccggcgtctcccgggtccgccgcggccgcgggcaga

SEQ ID NO: 2761 - DNA, 140 bp, Homo sapiens
gattgaggaaggaaattctgagagggtcgaggagtgaaagagcttagtcaagggatttcgtacgtgcgttttggggggccgatgagagtgctttctcgggcctttgtactcagtatagagacggcaagactctccctgtt

SEQ ID NO: 2762 - DNA, 133 bp, Homo sapiens
caaccccacaccccagaaagacagggacaggtctacccagtgctgcctgctgccacggtctcgcttcctggggggttgggaacgagactttgtggcttgtagaaagccatcttcaataaccagcaaggaaggg

SEQ ID NO: 2763 - DNA, 214 bp, Homo sapiens
cgccgcctccgtcgcgtcacagccgcgccagtgtgaagagcactagggcgggcgcgccggaaatacgtcacgggaacgccggcagcgcgtgaagttggtgaggcctgggccgcggcatacttccggcctgagtccggcaccgcgggtgagagaccgaggccgagcgtgctcagtaaaggaggcagagccagcgtttcgtttgagcgatgtttac

SEQ ID NO: 2764 - DNA, 143 bp, Homo sapiens
ccttcctctcccgcgcctctcgagccgaccttaacacggtccgcgggagcgaccccctcccgttgggccgggccaccacgcctcacctgcgggctggggtcgaagacctccatggggatctcctgggagggtgggtaagggcc

SEQ ID NO: 2765 - DNA, 241 bp, Homo sapiens
gtggagaaaaccaagactttcctgccggtggctctttcttgtcgtgatgaaatagagaaccactctttatctcaggaaggaaatctagtattagaaaagtcaagcagagatatgccagatcacagtgaagaaaaagaacagttcagagagtcagagctatcgaaaggcggttcagtagatatcacaaaagaaactgtgaaacaaggatttcaagaaaaggcagtaggaacccaaccacgtc

SEQ ID NO: 2766 - DNA, 139 bp, Homo sapiens
gggccgcctcagcgtgggcagcgtgtaccggcccaaccagaacggccgcggtgagtacggccccggcgcccctccggccgcgcgtacccctggccactggaaactgctccgggccccccgggcccctccttagaacttc

SEQ ID NO: 2767 - DNA, 207 bp, Homo sapiens
gtttggttttcggctccgcccgccttttcgcagggaaggtgcccggccaaactctgctctcttcctcccgcccctcgagtcacgtgatccgcttcaccttgtcgcgcgcccatcctaaacccgcgcgccccgcctcggctgcaacgttgctgacaggctggcgtgtcccaagctctttcattctgttaccgctggggcaattccgaa

SEQ ID NO: 2768 - DNA, 282 bp, Homo sapiens
gaggctgcctggcaggctggatgggagccgaggccagagtgtgcctggagcagcccctggctcagccaggcagcagcttggggcctcgccaggtggtggctgccagcctccctgtgagagccgccgcctgtggtttgaggctttctggctcccaggctggcttcctgcccagtgggtggtgaggctgtgattgcagcacgtcccacctggcccctcctggggctgggccctgcaccagctcctgcctttaccggctgggtgatgaggaaagggggctgaacc

SEQ ID NO: 2769 - DNA, 100 bp, Homo sapiens
aaaggaccctgcaaccctagacgtcatcggtgaaatgacagcaaaagagaccggaaatcgacacccccctgcccccgccgcccgcccaagcccccaacac

SEQ ID NO: 2770 - DNA, 178 bp, Homo sapiens
agagcgagcggtgcagtgacagggactgccactggggtcaaaggagcacagctccaggaagcagggcggccgaggcgccgctccgtgcgcgctccccggcgggaccccgcgcccctgcacgcccctcccgcagtccctgcccactcggacccccaccggtgccccgaagccccagggt

SEQ ID NO: 2771 - DNA, 215 bp, Homo sapiens
gtgtggggtgtctcaggaacctggcccgagccctcatttcccctccggaggaagagctatttctgagaccttcatcaaagaccccctcccgtggcctaccgagtttcctggggtgggggtgtctctgcaatccccacccgagcctggagcccctgtcttgtaggtacagcgtctctgaagaaaccccagctccctcccgcgcttactccttggga

SEQ ID NO: 2772 - DNA, 138 bp, Homo sapiens
caggtcgaattccgcgatgatccgcctgctgcaagcccaggttcttacaggaacgctgaccgggctgtctgctggtcgcgtggtgtgctgtttgttttagtctcacctgggggtctgaaggtgggggagaaggttggg

SEQ ID NO: 2773 - DNA, 761 bp, Homo sapiens
gggccaggctctacatgggctggggtccgcggggaggcagggcgccttggtcgctgacttcagccgttgagacctggtgggctgcgggcggtcccgtgctcagttgggccagggagtggtgtaggcagggtcgcgcgcccggtaagtctccaggcaccaagcaccgggggcgcagccggcttcagtgtctggcggcggcaaccggggctttaccgcatgtgggaacttgctgagctggagaagctacagagggacatggagagcgggacgtgggggtgacgggagtgggccgttcagacgccactgagcccggcgctggtagaacccgcctctctccagctctgggagacagttggagcctcagcgctgtgagtcctggctttgctcccccttatggtccactgaagatctggctgtggtttgcccttcactccagaccctgtgacatgggttctcagaagggtcctggaactcggatgggtgaaaggaacccctgccccgccccgcttgtggcacttaggggcgtggacccggaacctgggagtcagagggctggagcgggttcttcacagaagaggtatttgggccctagtggccctttgagggcagaagcctcccgctgaggcctgtcggtgggtgtgcttgggggtcagctctctgtaacagctttcggagcatgaatgttttataggatcagagcgggcgctgcgagaacacatactgccaagggagctctttcttaacgtattaataaagccaga

SEQ ID NO: 2774 - DNA, 135 bp, Homo sapiens
aggcgacgacccaaggggacggttcccagcggccgagcgactccagggtcagaggtctgcactccagtccggaggcaggcgactctttccccaacacccggcagctgcgagtgaggcaggaaaggcgagcgcccc

SEQ ID NO: 2775 - DNA, 147 bp, Homo sapiens
ggtccggggcagaggtctgtggggaagggcgaaacgccgggatagaaccggaggtagaagctgggggcggagcttcagcgctcgcgccggcgcgggcgcgcacggcgctcctccttccagatcccgatgaaggggcggggcctggaa

SEQ ID NO: 2776 - DNA, 158 bp, Homo sapiens
gtccctgcgcgcggcacgaggtgagccgccccttgggcttgcgtcttccgacaagagagaggcggtggtccgtgggtagcgcggggttactggaatgggactccctgaggaagtcccctgagaagtcgccggcacgctccgccttccttcttgcttcc

SEQ ID NO: 2777 - DNA, 1464 bp, Homo sapiens
acaaaggctgcctctcactgtggccgccgtgtcaccagccagagctgtcaggtacgtcagtcatgctgctttgtggtcatgtcactggcataatcccaagattaggtggccacaaagagccatgaatgaggtggtaattgcgttcaagggaaaaagaatttaagaaaaaaagactttactttctcacaagattcgtgaaagaagtgacagctaatattttaaagctggagcaagataattgtggtgagagatctttgtgtgttctctggaaaatgctgcatgcgcacaatgaatattcaaatgccattttgcgctgtgaataccagatcgccgggcctgaggccgtctgcatgggccgtcggcggagtcggcccggcgggccgcgggaatgagcgggccacacggagggcctgggcgcgctgctggggacgccggctccgagcaagaggacagccgcccctcgggagtcgctgggaaaggagtcagcgccgggcaagcagcctgcagcctgtgccagggaaacctagtcagccgtgctcggctggggggctcgctccgcactttcggtgccagaaaatgcccagaggagcggggcggccccagagcctcctttcggggcgcgaggcccggcgcgtgtgtacggagtccagtccccccagggagtggggtgcccgcaccttcccctccgcgctcggagccacaggggaggcccgggcagaagcgaaccgtcgccaccctggcggggcctcgtgactgcgggtgcagaactgggggtccccgccggcgcgtgtttcaggggtcctgaggcgcgcgtctgcggggttcccaggcagcaccaagaggcgccggcctaggagaaatccggatcgagacaactgctgtggcggctgggccgaggctgcggtcgcggtgggaggcggcgctgctggcgagtccacgcggggcggacggaggcgaaaacagcccgctttcgcggcgcaggcaaaagcaggaatggcgacccctctgcggggggacctcaggaggaaacgtctggcttggggagtccgcgctcggcgcgagctgtgggggcggccgggcgctctgggggcagttcggtgctccgagctcagcctcgtcttgcttttcaggggttggaggcggaagggggcaacggagcgagcccacttccgatgcacagaagcgcaggtggggaggaggcccggctggggaggctggtccccgccgcagccccgctgcccctataccttggctccagcgccagagctccgccgctgcgcccctggctttttgcctctaccccctaccctctgccgtccctctcctcctaaagccagtccttcctgtttctcctgggggcttccccagggtgctcatatatgtcccggcacccccgctctggcgtaaagaaagggcaccgccgcagggcggcctgagtttaagggtctgtccaccagactcatg

SEQ ID NO: 2778 - DNA, 1025 bp, Homo sapiens
tttatggcagccggagtgtgctaattaaaatgccatcttctcaaacaggtattggtggcttcttgcttttccatttatggataactgcaatatggccttgccgtttggtttaaaaaagggagagggggaggtgactcacagcgggcagtggcagtgggagctgcagtgctgaggatctgggtggggtataaggagcgattgtaaggcagaaacaccaaggagttatatccctgatgtattggcaggaagggctagagaaagaaacaaaaacaaagacttccttggccctgcgcctgtccaggctctgctaagagccacgttccctgcatacagacgtcggcgggcctttctgggtgacagtgctgagccgcggctgcagtgtcaccaagcggcacctcggccccggccccgcccgcgccagctgggacagtctggagaccttcttttcatgccgtcaagtctcattttgccaaggatttatttttcttcggggagagagggagagcgggggcaaaggatgttctcttaaagtatccagcgatcagagccgctgaagcctccaaccagaaactcaaacttccctggattgacttttccccctttgttcacatcatctcacaaatatttggctttccccggccacgtctgttctatttctgctccggagagatggctttgtttttgctttcgtgcggttctgcgaggcgctccacgatcccgccccctggcatggcagcacctaccggcggcgcgaactcggctgctgtgggctgctgcgcgctctcgcctttgtcagtttcatcagccggcgtttcagctgcgcgcgcgcatgcgcctgcccacccctccgccagttccgggcttgcgtccccgccaggctcccgcgcccgtggttctcaagtttcccgcccttctagcccgcgctacacccttcccagctcgccactttattttctcgttgttggcgcagcccgttcttccggcctaaaccaaatctcattttcgttcctcgcctcctccctcct

SEQ ID NO: 2779 - DNA, 399 bp, Homo sapiens; identical to SEQ ID NO: 440

SEQ ID NO: 2780 - DNA, 146 bp, Homo sapiens
agctgcagtgtgattggccttcggccccggtcccaggagcggggagatgcctgactcgggtcgtggctgacgacccgacggttcgcctgcggccgcctccaacaacggtggaaaccgcacacagggaccgcgggccctcggtgcag

SEQ ID NO: 2781 - DNA, 145 bp, Homo sapiens
ccctccctatcccggtaggcgcgttctctggcgccatcatatggcagaatgcgggactacaccaaatgcggaaaggcaccttccccttccctgagtatctgcaaactcagggctgggcttggtttttaagagctcagctcctgtg

SEQ ID NO: 2782 - DNA, 122 bp, Homo sapiens
cttgtgcaagcgcaggcctccaaagggtttgggcttcttgcccaaccgccgcgcttatctccgagtctgcccccagtctgccctctcgcaggccgagaaaggaccagaacacgttgggacga

SEQ ID NO: 2783 - DNA, 308 bp, Homo sapiens
ctcgtgactcaacaaggtatgtaatcgaactctgagacagaaatgcaggagttcccacttccaacgaaggatcaacaagagagctcctcagccctgaccacaaatccacccgaactcccagaagattcagaaacagccatagcgagggcttgctctgggcaaaaccaagataaataggctctctgagctaatgcatcctgttcatcaggaagtgccgtggctggcaggaagcccagtttgcaagggcccaactggcccagaactgtgagacgggagccaaggagacagagatcttgccctggctctgc

SEQ ID NO: 2784 - DNA, 395 bp, Homo sapiens
gagagagaattttttttatgaccgtttgtgctaagattattaggctctttaagaaagcccaagtgaatttttaccagcggtaaaattcactctttggctgtggacaccagagagtaacacaacacaggatgattcaggatgtgcttattgcacagataaatgttgctgacgtttcaggggcaacatgagactcatctctgggtatgccagtgtagccttgaatacaggatcccgggcagcaataacacaaaccaggaataagaactctcaaaatatggaattggagaaaatttcttccatgtgattcttcctaaagaatgtgggagatcacctgagcctcaggaggtcgaggctgcagtgagctgcgttcacgcccctgcacttcagctcgggtg

SEQ ID NO: 2785 - DNA, 129 bp, Homo sapiens
acacagccgagaaggggcagctggcgtctcggaggccgtcaccagctgtcactccgtgccgccggagttgccgctcagtaaccaacttcaacccggaaccggccacggagcctcccgccgcctctaccc

SEQ ID NO: 2786 - DNA, 498 bp, Homo sapiens
tcagggaaatgagcttggtctgttcggttggagttgttccacagagttcaaaggacaagaatgctgtgtgttcatacactgagctcttcgaagtaggaacttcgccctataaagcagaagagtggtgtttttttcttcttcttcttcttttgtggtttcacatagcaaatgagtgacagtctctacttacagacaaagtgagacgtcaggcattgagacgtgagtgtggcttgtatttctggtcctcccctgcttcactgctttcattttactcttatcgtgctttccagaaagtttgcctgctgggagagtctttttgatcgtttcccatgtgttgtcagatagctccatagaattcagtttctgagaaccagccagaagcatgcagtgacattgcacaatctgcctctgaagctggagatactagctgcagagctcaggggagctgctccacatcaccgacatgaagggaacaggcatcatggactgtgcgcccaa

SEQ ID NO: 2787 - DNA, 285 bp, Homo sapiens; identical to SEQ ID NO: 476

SEQ ID NO: 2788 - DNA, 145 bp, Homo sapiens
tcatcaccgacttcctccacgttttccttgtcctctccggccggcagtgtagcagcagcaactccctacgttgaagtcgtctccctccgtccccgcccttacttccttttcccttaaggacctcgcgcgcgcttccatattcaga

SEQ ID NO: 2789 - DNA, 144 bp, Homo sapiens
tccgccagggcaaatcgggaaggggctccgcggtggggccgcgactcccggcccccgccccaaccgtgggagctctgcgcgcgacgcgtcccaggtggccccgctattgttttaccttgcagggtgtttatatctcgctgattg

SEQ ID NO: 2790 - DNA, 337 bp, Homo sapiens
catggccactaagaagccgtgtcttcgaaacacaaaaatgaagaaggaacaaggggtgggtacatcaattctctaaaagtaggtctttttataggtggtatggtttgagcaactattctgtggtttggtggttttcttcatgtttctaactgaaagactattcctgtctgagtggatgaattaagaggaaatacgagcaaagaggaaaagaaacagcaacagcagcaacaaaagaagtgactccgccatacaaagtcaagtgagaaaacatctgttggaaacagctacataggaggaaatcgtaatctgttaatggctactcctgggaatagacagc

SEQ ID NO: 2791 - DNA, 142 bp, Homo sapiens
gcaccgggggcagttccgggagccgaccagacacgaaggctgaagccgcgacgccgaagacaggtgagatgttgtacgtcacccgccggacccccgccgcactcacctcgcggctcctttactccacaggccagtacctcgc

SEQ ID NO: 2792 - DNA, 205 bp, Homo sapiens
tggagccgacgctgacgcgccctgcgccgcaaagcattgtgggagctcgggcccgctagtgtcgtggttggaggcgaggtggggcggccgtttgttttctcgtggtctcgagctcgcgcgctctcatcccctcccccgcggcgtgcggcggggcggagaaacggcggcggcggcggcggcatcggcagcagtagcagaggctgta

SEQ ID NO: 2793 - DNA, 148 bp, Homo sapiens
acttcaagaatctaccaaaagaaaagcatctcttgaggagtaacttaggccagttccacgttgaagagaaaagtaaacgcctatcacagcagctctacaggattaggaaccggggcaatggggatggtggtggttccggtgagggagc

SEQ ID NO: 2794 - DNA, 143 bp, Homo sapiens
taaagcgggagggcaccagtcgcggccagtagcctccacaggggaccgggttccctcgaaggttcgcgtacctcccccgcgcgctgcaagctgcagccagacacccgcgaagttccgggactctccgcacccgctagatctgc

SEQ ID NO: 2795 - DNA, 148 bp, Homo sapiens
cgcgggtagttgaaccgtgatggtggggaggtggtcttggggggacccctgccgtggggaatgcaggaatggacgcggcaaaaggagggaagagaacttcaggtgcggagtgaaaacgggagttaacggttttgggaaactccagggg

SEQ ID NO: 2796 - DNA, 142 bp, Homo sapiens
gcttgacctcggactacatttactttgcggggcaagaagcgtgtggtcccgctccgggccgcttttggctccacttacggcgacaatgcctcctagcgccctgcgcagcgcagtcacgctccctccgccgccggcggcgccc

SEQ ID NO: 2797 - DNA, 134 bp, Homo sapiens
agagcgaaactcaccgccacggtgtaactttcactccacataatccgcttccgggtttgcgcgcatgtgcgcgcgcagtacagaagccaggtctgggcggggcccgcgaggtgggcggggcctggatgaggtag

SEQ ID NO: 2798 - DNA, 148 bp, Homo sapiens
cccgggtgccctcgacgcccaccccgggggatactcggggaggcaggcaccggatggggagcgacgggtttttccttcgggagaggccacccgggcacggtctcctttcgccccatcctcaggcacacctcgccgcgccgtcttgagg

SEQ ID NO: 2799 - DNA, 133 bp, Homo sapiens
gggagctggtgccagccgacagccgcgccagggccgctccgggtaccagggtcggatcgggtgacgtcgcgaacttgcgcctggccgccaagccggcctccaggctgaagaaggacccgccccggccttgacc

SEQ ID NO: 2800 - DNA, 144 bp, Homo sapiens
ccggagttgtcgctcagttaccaacttcaacccggggccggccacggagcctcccgccgcccctaccccgcgtccccggcacccccggcacccccggacccccgcgcccgcgtcacttactcctctgccgtcgccacctgtctg

SEQ ID NO: 2801 - DNA, 220 bp, Homo sapiens
ctgatcccagggctcacaagtcccccacgcttcagtcaagtcattctgaaagtctcacttcccatatgttttctgagcatgacccaaaggggtgtggggaggaagtggccaggctgagctggggccagcagtcaaatgagctcaggctcatgggtcctgcaccctctaggtgctgccccaggcctccgtaggcttttggcactagaatgatccaggctag

SEQ ID NO: 2802 - DNA, 600 bp, Homo sapiens
cccgagttagctggccagttcccctcggggctgccttgaccctggctccggaggcagcgcctagctcaggatgtctgcgagaagcggatggttagtgagaatccgacgattctttcgctgaacctcccgcgtaccccccaacagcgcgggagcacgcgggacccgctgcgacgtggcccaggagcctgcgccgccgcggcgcagaggagaacgcacaaattgtatttcagcgccaggtccttccgggttaatgagctgacaccatgattaaagctgaccatttgtaatgtgtctcgaccctgccgctgagccctgaagaggttaatgcggtgacggaggccggcacctgcccctcgctggcctcccgggccgctgcgcgcaccccctggcccccgccccctcgcctgcccctgccccggctgcgcggccgactcctaatcaattagcccattaacgagcccctcgaggagttaagtagggaagagttctgccacgggcagggccgcagtcggtaactcaccgcggctaatgatattataagcgctttacttaataacccgggcgcggtgcaggcgaggaaggaactgcacagtcatgcag

SEQ ID NO: 2803 - DNA, 132 bp, Homo sapiens
aggatgcaggccatggacccggccgcggcggatctttacgaggaggacggcaaagacctggacttctacgacttcgagccgctgcccaccctccccgaggacgaggtgagcccccggccccactggggggcc

SEQ ID NO: 2804 - DNA, 190 bp, Homo sapiens
acgggtgaaggctcctgaccatgcctcgcagctaactggcagctgcgcctgcccggcaccgagccctgcccaggtggacgcttgcgagagcattacggcgatggttatgtaggctgccgttcttcccctcccaagcacctgctccgcatctagcagtcgctcgccgccagtctccaaccccgggtcccct

SEQ ID NO: 2805 - DNA, 187 bp, Homo sapiens
gaggagcccctgagatggagaaagaacgtaggcagcatttgcatttctggttccagtaactggggaggccctgctatttcctgtcattgagtttctgagatagaacaggatccttatgacaacttccccctttggttaaagcacaatcaatttgggtttctctctttcgcaaccaaagggaaaaaaa

SEQ ID NO: 2806 - DNA, 200 bp, Homo sapiens
ccaggtctgtcctcttggggcagatggcgtcaccgtatgtgcatctcaggatggccaaggagcagtttgaggggaagtgggtagagcttagacatgagcagtggggtgccacgtccgggggtgaggccccttgagatgcagaatggagccaaggaggaaggaagagggtgcggcagcaagtgggtctccatctcttctct

SEQ ID NO: 2807 - DNA, 148 bp, Homo sapiens
gccgagacccaggaccctccaggctgacagctctgagccctcacactcaccgggcctccccttccccccgggatccccgctccctgcccaactcggcgcggtccgtctaggctttccatacccttcgtctgtccggcgggcctctgcc

SEQ ID NO: 2808 - DNA, 149 bp, Homo sapiens
ctccgctggtcaaagtgcgtgcggagtagttggcaaagttgagagcggagacgtctctgggaacagctgtttgcgttccgggcggaggcggcgcgctgagctccttggccttgagccagcgagcctagaaggaggatggaggttttggg

SEQ ID NO: 2809 - DNA, 150 bp, Homo sapiens
ctttgctggggggaaaagaaaggcaaaagtgtgaggatacacagagcagggaacgagtggagtcccctctccaccggggcagtgtgagaacggagggcgtgcagtcagggggtcctaggacttgggtgggtgctgcagaagtgaccagga

SEQ ID NO: 2810 - DNA, 151 bp, Homo sapiens
cttgcaaagggaggtttgcgttcaatgaaaggatcaagtgtggccagggcagcccggccgacctcgagaggttcccgcgtcctctccccgccctgcctaggagtggggtgtcggggcctgggcgcgggagagcggagtgagggggccgggt

SEQ ID NO: 2811 - DNA, 420 bp, Homo sapiens
ttgtagctcagctggagggcctgcccactcgttggattcccagaccacttgggctgggatagctgacttggctgcctccctcccctgctgcccctgccttgtccgactctggccccagatggtctttgtgtttccctccgtggctgtggcttgggtgccagctctgattgtctagcaggggaggtgggctgggtgccgatgctcgtggtgtgtgtgggcactgtgggcactcgggagagggaagctgccctgaccacagaggaacttgggaggtttgtggccagtgacgctggagctcccagtgtcacccgggctgtgaggcccaaggaagtgagaacttggagtatctggggaatccacatacctgcggggcggggcacagagcaggcgttgtgcacaggataggagcagggcgccaag

SEQ ID NO: 2812 - DNA, 151 bp, Homo sapiens
tgcgacctcggctgcaggcttccgcagctgcttccagggtgctgtccaccccgtggtgctgaagtgccccacgcccctccgccacctaccggaagccgcgtccgcgctacagcctccactcaggattcgacccgaactccaagacgcgtcc

SEQ ID NO: 2813 - DNA, 233 bp, Homo sapiens
ttttttgtttttttccccccaggcaagggcctctaaccctggggctacagacgggaatcataaagaaaaaagcggtgagtgggcgaactacaattcccaaaaggccacaaaggggccaccactacgcatgcgtagatccctcccgttagctttggcgcctcagcgagctcttctcgcgcatgcgttctccgaacggtcttcttccgacagcttgctgccctagaccagagttg

SEQ ID NO: 2814 - DNA, 144 bp, Homo sapiens
ggttatgttggagttgtaaagtgacacttaaaagctcatggtcaggtgaatctcaggaaaaacgagaccttgcagtctgctattcgtttccagaagattgaagagcacaattcatcaaagtactgacaaaggcttgagtgttga

SEQ ID NO: 2815 - DNA, 176 bp, Homo sapiens
agggcaggtgttaccgttgggatcgagatcgggaccaggtttaaggttgcgatcgggtcgggatctggggtcgccgtctgctttccccagcggaggagccgctttccggggccgctctgcgcggagggttccgggggcggctgacccttcccgccggcttctgtggccgagctccg

SEQ ID NO: 2816 - DNA, 145 bp, Homo sapiens
gaaggccgggaagtaggaggtgtttgctcaacttctgaggacgtcacgcctctgcctcccgtagccaatcagcagccgccctgagggaacaaccttctcatctgccaatcggcggcgctgccagttgctacgtcatgcccggccc

SEQ ID NO: 2817 - DNA, 144 bp, Homo sapiens
gaggaacatcagataaccagcttttccctcgtgtcatagggatgtggaggaccctctgtgtgcagggccctctgctgagcacggctgcccagtggcttcccctgtgggaagcggagaggcgggcactcggtcacaatgataaga

SEQ ID NO: 2818 - DNA, 128 bp, Homo sapiens
ttttggctgggaaggaggacagtgaagctctaccgccaggcaggaagcccagccagtgtgttcccagaccaaactcagggtctggctgctatttctcacggcccaataacgagatgcagataaactgg

SEQ ID NO: 2819 - DNA, 139 bp, Homo sapiens
aggagggaaattgctaggtcatagttgtcttagtttgggtttccctagagcagagcgtgagacagagactaagctgctacctgcgtctgttgttggttgtttatttgtggggtaagcccaggaagcaggagtaaggtgg

SEQ ID NO: 2820 - DNA, 376 bp, Homo sapiens
ggagggactgcaaagagcccggggacggtgggaaagggcattcccagcggtagaaacggcgctgtgtgaaaacaaaacaaaagcctggacgttgcagggaaggaacgccggctgccagtgatagggaggagaggctggagcggtgggagttcagagtggtgttgagtgggtgccgggcggtgggccggcgtcgccctcaccagggcaggcggcgggtaggctcaccatgacttcggcgaagatgtccccggcgtactcgcgttctccctgcagccccagcgcgctcagcgcctcctccagccccggcggcctcgccaggcgtcttggggagacagtggggcccgcggggaagccgtcggggactgcggcgcttgaa

SEQ ID NO: 2821 - DNA, 211 bp, Homo sapiens
aagggagggaacaagataagtctctgcaatgagcgccgacacctctccccgggccaggcgagttcctcaagaccccgctcccacctcccggggcccgaagtgggaaggaagaactcctgggaatagagtggcaaggctgggcggccggcagaaaagcatcccggcctctcgggctcccagctcgatacgcaccgcagagcgccaggaaccg

SEQ ID NO: 2822 - DNA, 175 bp, Homo sapiens
gagcaggaggaggaggggccggtgcattctcgccgctgttctttgcaacctgcaggggccggtgtatgtccggcgaggagccggggccgctgcgggtgcgtgcaacccccgaaggagacaatccctccacctcggggcgaacccgggggctgcaagccgcgggcgggcgggcgag

SEQ ID NO: 2823 - DNA, 159 bp, Homo sapiens
actcagtatattcttggggatcccaggcctcggaggtctgcaatagttatgagtgtaggtgaagcgtgtttgcttaggaccggattgattttagattttttttccattcatagcgtccgtcattttcgcaccacagctttttgtagcacttcctctcat

SEQ ID NO: 2824 - DNA, 121 bp, Homo sapiens
gggaaagagagaggaaaatcaagttttcttcagcacgagggacagctctccaccgaccgaaggaggagaatgctatttatttcagcaccaaatatccggacagcgcctctcgggaggtccg

SEQ ID NO: 2825 - DNA, 559 bp, Homo sapiens
tccggcacaacctgtcgctgcacacccgtttcatccgcgtgcagaacgagggcaccggcaagagttcgtggtggatgctgaaccccgagggcggaaagacagggaagaccccgcggcgcagggccgtgtccatggacaacggggccaagttcctgcgcatcaagggcaaggcgagcaagaagaagcagctgcaggcgcccgagcgaagcccggacgacagctccccgagtgcgcccgccccggggccggtgcctgccgcagccaagtgggccgccagccccgcctcgcacgccagcgacgactacgaggcttgggccgacttccgcggcggcgggagacccctgctcggggaggcggccgagctggaggacgacgaggccctggaggccctggcgccatcatcgccgctcatgtacccaagccccgccagcgcgctgtcgccggcgctgggctcgcgctgtccgggtgagctgccccgcctggccgagctgggaggcccgctgggcctgcacggcggcggcggcgcggggctgcccgagggcctgctggacggcgcgca

SEQ ID NO: 2826 - DNA, 139 bp, Homo sapiens
ggcagagagcccgtccccagcgtgggggttggcgggacgggctagctgccgtggcggggctggggctttcccgaatggcgcgcccaggacggctcttgcggctggctgtccaaactgggcccgcgtcctgaagtgaccc

SEQ ID NO: 2827 - DNA, 319 bp, Homo sapiens
tggctcttgcaaaatctgcagctctcgcaacggaaggcgctttgcaatctgcaccgagaggtgtgcgcggaggggcggaggagggggcaggaggaggcggccgccttgaggcgtggccaaagcaaacttctttcgcggaaaaaaaaatccaaaccaaaacacccgacgccacagcgcgcgcccctcctccgggtccccgcccggcgcgtccagccccgccagcctctatgggcatgcaacccagccgcgtgcctccctccggctgcaaacacggaccaatcgtctccgacaccttgagacgcacagccaatggggcctc

SEQ ID NO: 2828 - DNA, 149 bp, Homo sapiens
cttctccagctgcctcccacctggggtagcctcagtggagaagcacagctgctaaactaacaagcgcagtaaagcttcctgggccggatgcgccatgagaagatgggtaaaaacattaggagccatgcacccataaaggaaaccaaaca

SEQ ID NO: 2829 - DNA, 109 bp, Homo sapiens
gagtttgagacccctgctctagactggaataggagtctctgactgtgtcctggctccatgggagtccccgtctaggctaggaagtaccgtagtaatgtgtgtgtgtgtg

SEQ ID NO: 2830 - DNA, 432 bp, Homo sapiens
cgaagggtttcagccacaaggtctcccggcctccggaattccaatctcttgccagacccctccctcacatcgttcctcccgaggaaacgtgacccatgccggccgccgtggccgccccaacctactagttcgcctttcctccgcgaacggttctcccggccctcgcgccgctacccaggctcagggggcggggcctcgatgcgacccagtgcgcttgcgctgaccgccccggctaggcttaaagagcaggcggggcagagacccatacctttggcgctgagtcgaggccaggaaggggcggtcgatgagagggcggccttagcattaggagtgcgtcggctgcaccctggcggatggaccttgggaaggaggggaggggaccatcggggtcggcggggagctacgggtatgcatagctcatagagcgtcaga

SEQ ID NO: 2831 - DNA, 151 bp, Homo sapiens
ctcctccctccctgaagctgtgggctgggccatcggaaaactttcagttttgtttccttgcctgcaagaaacgaaactcaaccgaaagcctgcagagagcagaacatggaaggagacttctcggtgtgcaggaactggtaagaaagtgctt

SEQ ID NO: 2832 - DNA, 185 bp, Homo sapiens
ccttctagggtggcaggcagggagattacggacagcatggggcatgtgaaatcctgacacttctacaaattgggaagaaacctttggcatgctgcctgcttagtgctctcacagtgcctggcctcatactggctggtggcaaatcgccatcaaggaaataggtaaccatggacactgatatgatg

SEQ ID NO: 2833 - DNA, 104 bp, Homo sapiens
gggggaacacatcggacgggtaccctgggtcagcgctctccgcgactctcctagccctgggccgggggcaggaggggaaatcacctgctccgtcgggcgccgcc

SEQ ID NO: 2834 - DNA, 155 bp, Homo sapiens
attctgcccttaaatgagaaataaagacaatagatttgcccactgcagactgggataccagaaaagacgttctaagtctcgcctgagacaatattaacctgctatcttaagtcccaacttggatgacttaaatttcagtgtacgtgcctccgttc

SEQ ID NO: 2835 - DNA, 163 bp, Homo sapiens
tcacccaggtcaccagcgggctctgcaggaagagctccaggagctccgagactgtcacgtccatgctgaggctgcgcccgccggctccgcgccccccgccccgcgtccccgttcccccgcgccgcggcacaaaacggctccgcagcgagcagcgggcgcgggg

SEQ ID NO: 2836 - DNA, 135 bp, Homo sapiens
gagtctgtgactccagacaggacccactgtgtcctcttgaactttgcacagcgcgtgacgggggcagacggtgcaccgtggcccggcctttcgcgggggtcctcggggaagagagaggagcgcgggtttcctcgg

SEQ ID NO: 2837 - DNA, 134 bp, Homo sapiens
aaaccaaaatatgttccacaagtaaagtttgatccaccacttctagtaaacacttggtttactggagtggggtgagcgtggtgcttctcaaacgaagggaaggaaggtgaatgcggaacaaaagtaaaaaatat

SEQ ID NO: 2838 - DNA, 158 bp, Homo sapiens
tgaacagggaagtaatagccaggccactctgagacatttctatctacactttgctcactgaatatgcagaaataagatcgttggaaaagaaagcacctgaggtcagacaggtagtagtatatactccgatactggtaataaagagggctacagctccg

SEQ ID NO: 2839 - DNA, 148 bp, Homo sapiens; identical to SEQ ID NO: 61

SEQ ID NO: 2840 - DNA, 297 bp, Homo sapiens
ccggaacgaccaccaggatcaagacgcaatgtttccagctttccataggttccctcgtgccccacccctcagaagtaaacgttattctaactcctatcactaccggtaagttttgtagggaattattttggaggaagtggaaggtggaatgaatgggcccacagtcccctgggactgggcgagacccgtggaggctccaggggtccgtagagctcttcgctctcaccgacccgggccacacccgccaagctggtagttctccgaacggatccctcacgcccagcaatggccggaggg

SEQ ID NO: 2841 - DNA, 135 bp, Homo sapiens
cgacctgtgaggtgcgccccccgcaagatggcggcagccgggcctcgggctgggtgggggcggaacttggcggaagtgcgcgctactcccctcgcagatgcaagtggggaggctgtttgtcccacagcgggcagg

SEQ ID NO: 2842 - DNA, 148 bp, Homo sapiens
aggcggagaggaaaagcggacccacctgccaggctgcgcggggaggctggtcccgggctgggcaggcgggctggcctcgcgccctcgaggcacccggcggcgctggctgtgcggaggggcgccggcgcggccgtatttgtacccgcgg

SEQ ID NO: 2843 - DNA, 144 bp, Homo sapiens
aggatgggatgcctggaggagctaaggggagagcacgaggatgcagagagaggaatcagacatccctgctgtcctcgcggtccaggagcactgggcagcttcactgaccggagaccgcgcctgtccaggaaagtggacagcgcc

SEQ ID NO: 2844 - DNA, 139 bp, Homo sapiens
cctctcgggcctttcggccgccgggctcctttccgcgagagaacactgcggcggagaaaagtcattgtcaccttcaacgtggatccctcaactccggcgactcctcaattatgcccaggctccactcacttccccgccc

SEQ ID NO: 2845 - DNA, 192 bp, Homo sapiens
catggcacagccaatgggaagggccggggcaccaaagccaatgggaagggccgggagcgcgcggcgcgggagatttaaaggctgctggagtgaggggtcgcccgtgcaccctgtcccagccgtcctgtcctggctgctcgctctgcttcgctgcgcctccactatgctctccctccgtgtcccgctcgcgcc

SEQ ID NO: 2846 - DNA, 141 bp, Homo sapiens
cccaggcgcgccgtggcgcctcccaccagcgcgatcacgttgtggcccgctcgctgcaaatgaaacaggcccagcagcgcaagtagatgacccacatgaagcgagtctgccgtggggtcgaagccacagtaaatggtttgg

SEQ ID NO: 2847 - DNA, 293 bp, Homo sapiens
aaaaaacgggtcgcctcccaacccgcgttgtcctcgcgccttcgccctgggtaggtgaggccgagaaggcaaccgcgaaaaggaggcggaaacgcctcctacccgacccccgaaaagttgaccgcgaccccgcctcacatggcccctcccaaccccgtctctttaaggcgacagcagtgagagcgcatcatttagtttcggcgaacccatctttaaagcacgaaactactacgtcccttatgttgagttttgtgaaaccgtctccagggatcaaattcagagttgcggccaca

SEQ ID NO: 2848 - DNA, 145 bp, Homo sapiens
cccagagttagacaagcagacagagaaagtgtgcagggctggggttctggcccgggcagacgggaacgcggacacatctagcactccgagtccgtcaaggcagcgcgagcgctgcgccgctggaacaagtcaccgcgaaccctaa

SEQ ID NO: 2849 - DNA, 137 bp, Homo sapiens
cacgcctccctacagccgcgctccacacaccctccagcaacgcgctgggcggagccagccgcctcgaagcgaggctcccgggtcggccgagccagcccccgctcaccctcaggttccctttagttcgctgcttgttc

SEQ ID NO: 2850 - DNA, 214 bp, Homo sapiens
acgccatgttcctcaataaccatttccgggtgaagagtgagtttccggtgtccccttttctacgtcctccttttgccggcgaaagactggcaaggggggcgcaggcgcaaagaggtcgctacgcgcacgcgctgttgttttctcggctgtgcaccaggctgtcgtgcccgggcacgctctccctgctgtctcccccactacacgtaacagtggt

SEQ ID NO: 2851 - DNA, 133 bp, Homo sapiens
gcgggcggcgccgccgggttgctcggagctcaggcccggcggctgcggggaggcgtctcggaaccccgggaggccccccgcacctgcccgcggcccactccgcggactcacctggctcccggctcccccttcc

SEQ ID NO: 2852 - DNA, 142 bp, Homo sapiens
ttcttagcaggccttacagtaacaggcagcaggcgggcagtaggtcatcaccccaacgctagaggaatgagaccatatcgatccgcgaggatcaagtcctgatcctgtccctggcgacttctccaggctgcgcggtctcttg

SEQ ID NO: 2853 - DNA, 147 bp, Homo sapiens
ggagcacgccgatatggctgcgctgacactgaggggtgtccgggagctgctgaagcgtgtggacctcgcgacggtcccgcggagacatcgatataagaagaaatgggtaaggtccggctgggggcgcaggagggaaaagtgagggtg

SEQ ID NO: 2854 - DNA, 143 bp, Homo sapiens
gacagactccagcacagccacgtggtgaaagatttatagacaaaaaaagggaagtgacctacagaaatcagaagtgaggtacagctcagcattagccttagttgaacacagtttgaacactcgacagtgtatgaatggttgaa

SEQ ID NO: 2855 - DNA, 155 bp, Homo sapiens
cactcaagctgcgcggctcgggggtgaggggtagggtgcgggggtgtcacccgtggagcatccagctgcgtgacaacgccgccccctcccggtgccctgccgagctgcgtcccaaaatggagaaatccgactgtctctgtggcagaggccatccc

SEQ ID NO: 2856 - DNA, 324 bp, Homo sapiens
gtctacgatcagcttgccaccacccacgcgctcctgtatgggccactctgtgcagtcacttcctggggctgggtctcctttcccttctccccaggctcaggcagggcggacctagccacagcagctgggagcccacccgtctgcctgtgcttccttgcagccgtccagatccacatcctgaaggcggacaaggcgggggactggtggaagttcacggtgaacatcatctccgtgtataagcagggcacgagccgcatccgccgcggtgaccagagcctgtggatccgctcgcgggacatcgcctgcaagtgtcccaaaatcaag

SEQ ID NO: 2857 - DNA, 296 bp, Homo sapiens
gagcctcggcgggccgcgggaaccgaggctggctcgcgggccggcagctgtgctctccaaggtctgcgccggagccgccttccagctcttgtatcactatgtgcctcccgaaggcgacactatttgcataagccccgccccatcccgggcaggttgcacggctattggctcctctggagcggagtggcaggcggggtttcaggtggggaccgggtggccggcgaggcccggccgcaggagcgcgccccgcctgcccgcgctgaccttcccggagtcgccgggaagcgggagggctg

SEQ ID NO: 2858 - DNA, 378 bp, Homo sapiens
agctcagtaccagcctttacattgggctgcggctcaacacggacctagaggccgtcaagtcggacttggattacagccagcagcaatgggacagcaagaagcgcgagctacagggccttctgcaaactttgcacactttggagctgacggtggcaccggatggggctcctggctctggcagtccctcgcgggaacctgggcctcaagcctgcgccgacatgtgggtggaccaggcccgtggactggccaagagcggtcctggcaacgacgaagactcggatacgggactgagctctatgcatagccaagactcggactccttgcccatgtgcgaatcccttgtgtaggggtggggggcggggggcggggggcgggaac

SEQ ID NO: 2859 - DNA, 370 bp, Homo sapiens
accctcagcctcacacaggcactctcaccctcagccttcacatttccctcacctccaagtcccgcctttcgcgcatcgcctgctgctctcccactcagcgccacctcagtcccacaaaggccgggctgggatcctgtggcctccgtgctgaccaacgtcaactacaattcccagcaggcaccgcgcctgggtacacttgagcttccggaggacgccgggaattgtagtcctggcgggcgtgggcccttgaggtgtgctgggagctgtggtccgggtcggcgggcgcgcaagttggctagtctctgcggccacctccggaagggtccgccggctgtgctggtgaggtgggtttcgggggtgttctccgtcc

SEQ ID NO: 2860 - DNA, 138 bp, Homo sapiens
gcagtccctgcccggcccagtccgagcttcccgggcgggcccccagtccggcgatttgcaggaactttccccggcgctcccacgcgaagccgccgcagggcccccttgcaaagttccattagtttgaaggacgcgaat

SEQ ID NO: 2861 - DNA, 129 bp, Homo sapiens
ctcccgccctggaagaagcggggagctgaggggagaggtggaaccagcagagaaacgggccgggcaggagcccgcaccagcccggcttgggacaccgcagccgctcctgccctctgctggctggaaggc

SEQ ID NO: 2862 - DNA, 134 bp, Homo sapiens
agctccggctagagccggggagggagggccgcctgcccgcgccacagccccaccgcccgcccgcggaccttcagccagctccggcccgcggctcccggctgaattaggcatctccgactccggactcgccgctc

SEQ ID NO: 2863 - DNA, 136 bp, Homo sapiens
ctacactctaagtaaataactgaggaaggagaaaagagaattttgcgacttagattttggattttaattttgcaggatgagctgtcaggagtcttaaaatgcggccccacaaggagtatacaggtccctattatgt

SEQ ID NO: 2864 - DNA, 185 bp, Homo sapiens
tgtgagttctgctgagggccactgggcacgtggcgggcttctcctaaagagagtcatgtacgtctgcaagattaaaaaaaaaaaaaggcagggtaaagtctgtagctgaaggttgacagacttccttccgcacttgggtttttctcccttctaagggccgtttgaaagttcttcttgtgcttcta

SEQ ID NO: 2865 - DNA, 132 bp, Homo sapiens
cttcagccccaatcacgtgggaggaagtgtaacttcccttttctggattctcaagcagttactttcacggtcagaacacgcagctattatgattgaaaacttaaaagggcaacaatttcagtcttgcttcta

SEQ ID NO: 2866 - DNA, 137 bp, Homo sapiens
agggacttccgtcgcaaatctttctgtttttgctaaagctgcggtcgcaaggcctagtgatcgcctgaaacgtcgttttaaaggggcgttgcatggaatgttcggccatccctgctgaaagtttttacctctttctc

SEQ ID NO: 2867 - DNA, 146 bp, Homo sapiens
atatcggggagtgatgtggaagacggagcgggaatcccttctgcggagcctccccagccgggtcgtaggaggcgcgcggggcctctcctcacgcaggcccgagtcctgagcatccccactcctggccgcggggttcggaccccagc

SEQ ID NO: 2868 - DNA, 148 bp, Homo sapiens
gaccaacaagttcatcaaagagctcattaaggacgggaagaacctcatcgctgcgacgaaaagtaagcggggacgcgggcgcggacgggctgcggcgtggcgaggcggctgggggagcctctctcggcaggagacggagggtcttgtg

SEQ ID NO: 2869 - DNA, 135 bp, Homo sapiens
gggccgcttcccggctgggggtgtctgcctcctgtttcggttcagggtctccagccgcccgggggagggaataggcggctttcccgcggggaatcccgctgccttgcctcccacagttccgttcccagacccacg

SEQ ID NO: 2870 - DNA, 137 bp, Homo sapiens
cctcccaccgcggttttgggtttccagcctgttgcaagcctgagtcgtacgctgccgtgctctcacctgcagctgagggacagccttgctggaggtgcggtgctacttgtcaagtcctggataagagagaaatggaa

SEQ ID NO: 2871 - DNA, 290 bp, Homo sapiens
ccgctggccggcctcgcccgcctccccgacccctgcttgggcgggagccgctgttaaccggggttttcgggggaggcgtttggggcctggacggcggcgcggggagggggcagctaggggcgcggcctgccagtgcctcctgcagtacagccctggagggcgtggggacttgggggcggtgaaatagccgctgtaggtccgcctctttcattgaagaaatttaagttcgtgtggttttaccttttccgggagtctccagctggccctcatttgtgtccggagctcaggag

SEQ ID NO: 2872 - DNA, 147 bp, Homo sapiens
cccaggactgtcccagctccctgccacaccgggcttggtggggagcaccccccacccccagcttcctgagctgcccaatctggccaggaagaggctgcctcgccaatccagagcgtctaccagaaaccggtcgtcatggaaaccttg

SEQ ID NO: 2873 - DNA, 173 bp, Homo sapiens
tgttacagttcttcaagatggtgtgtctggagtttgttccttcagatgttcagatgtgtccggagtttctttcttctggtgggttcatgctgacttgaggagtgaagccacagaccttcacaaggagtgttacagttcttaaaggtggcacgtccggagttgttcgttccttc

SEQ ID NO: 2874 - DNA, 142 bp, Homo sapiens
tgacttgatggtatttgatgactaccattgcattgagaatgaacactttggctcagaataagagacgctgttttgagcagggcctccgcttctctcattagcagctgattttgaaaaacttgggctgaggataaggctgcta

SEQ ID NO: 2875 - DNA, 443 bp, Homo sapiens
cccctggccctacacaggacaggttctgcgcactcggccgccaccttccttacacggcttctcaggaaagcagcaggcagctgtggcccagcgtgagccggcaaagcacttccctcccagagccccgtttcctcatcagcaacaaacacaacaagcttcctcccctggctgctgtgaggaccgacagcccctcctggcacctgcacagggcatgacacgcacatcacagccgccttcacccgctcagcctcccgcgtccccacagcccggaccggagcctcagagcaccaggacacacccatccggacaccggcaggtttgacaccacagactgtgcttggctggggagtgagaatcctcctgagagagccacggtgtcccaggtcgggggcagcagagtgagggtctggccgtgggccccggtcgggggctgagccacgctc

SEQ ID NO: 2876 - DNA, 145 bp, Homo sapiens
acggagatgctttgagaagtgacaggaatctgagtggctcctcatgagaaccttccgacggaagtgacgtcgttacgacgcgcgacccctgtagactcgtccctccggaaggctcagtgcataagtgggcagtcgttcaaccttc

SEQ ID NO: 2877 - DNA, 143 bp, Homo sapiens
gggaggagccgctgcaaaaaaccatgacaacgatcatcacaataataacagccctcacttcctgccaggccacgtgcatctccactgtccggaccctgtttcaggggtggggaaacagacccacacggggttacctgccccag

SEQ ID NO: 2878 - DNA, 177 bp, Homo sapiens
ggcctgcgccgattgcccagtggccccgcccttaggagggcggggcctcggactgactctcgaatgtcccggatgtgcggtcttggaggccggcgtagcgctaagcttctcggcagcacctgcccaactctgtagaaggcgctcagtgtatacttttattaaacgattgaaaagact

SEQ ID NO: 2879 - DNA, 195 bp, Homo sapiens
tggattcctggtattctgatctcaaaacaacagcaaaatggattctatatcagtgatgtcttagtcaatacaatgaaacggcgtctgaggtaattcacgtgaaggtaaacgcaaaccagtggggctggggggagggaggtgctctacaaaggactggccacagacacggggaaaacacacacagacacacacaca

SEQ ID NO: 2880 - DNA, 143 bp, Homo sapiens
cctccaggctcgcggggcagccgaccggggaccccggcgggggccaggcccgactgcccagcctcggaaccctggcatcgcccccgagggagggagtcactggtggctgacagtgtttggtaaccacagaaaccgagatctga

SEQ ID NO: 2881 - DNA, 148 bp, Homo sapiens
ggagcccaggctgcagttttccggcagagcagtaagaggcgcctcctctctcctttttattcaccagcagcgcggcgcagaccccggactcgcgctcgcccgctggcgccctcggcttctctccgcgcctgggagcaccctccgccgc

SEQ ID NO: 2882 - DNA, 150 bp, Homo sapiens
tcacccgcgtggagtctggaccccgggtgggcgcagacttcgctccggacagttcattcttccaagctgattttcgggcgagagtcccccgccagccgcgcctcagtttgagcgggccgctaacggcgccgtgggttctcgccttacctg

SEQ ID NO: 2883 - DNA, 114 bp, Homo sapiens
atacggatggctagtggggcgccggggccatctgggttgagagagcggcgattgcggccgctgctgaggcggagactccccgccgccgcttcctccacccccagtccgccggcc

SEQ ID NO: 2884 - DNA, 150 bp, Homo sapiens
cgttccaaagctccggctcccgagtcgccaccaccaccattctctagaggagcctccgccgttccctccgccatcggcgcccctcacatccgctctggagtgtggcgggaagaccttccgggtcacgcgtgtcttccctgattgtgctgg

SEQ ID NO: 2885 - DNA, 146 bp, Homo sapiens; identical to SEQ ID NO: 432

SEQ ID NO: 2886 - DNA, 144 bp, Homo sapiens; identical to SEQ ID NO: 593

SEQ ID NO: 2887 - DNA, 148 bp, Homo sapiens
gccccgcctgcccggctctctcctacttccttgctcgctttcccctcggtggcggtcacgttcacttacgaaatcacccacacccacttgaagggtgcggagatggccgggatccaagcgcccgggaggcctggggaggagcgcccgg

SEQ ID NO: 2888 - DNA, 143 bp, Homo sapiens
ctttcctacaaagctatggaagatcttacccaattaaggttgttagactgaaatgaaacctttcaaaggaaagacgtttgaaacgtttcaaatgaaacctttcaaaggaaagcagtggtggagctggaggggaagtggcagtt

SEQ ID NO: 2889 - DNA, 289 bp, Homo sapiens
ccccacccccggcgccccgaggggaactgcttcgcacttggcaataaacacacaccactgctgccgagtcggacacacaaggccggaggctgagggaactcttcgtcgcagcagcctccccaaaacaggtagaccctcagtgagcccagaagaagatggcgcccactgcccctccggtccggacaaacggacgtacggtttatctgcccatgcgctctgcaggcgcaacccaccaccaagcttgcgcacgcgcgctgccgctcacccgtttcccctcgctagaggaggg

SEQ ID NO: 2890 - DNA, 147 bp, Homo sapiens
cccaacccggcccgcccgccgcgtcgcgggggcatgtgagcgggaagcctaggctgccagccgcgaggaccgcacggaggaggagcaggagcgcggagccgcgagccccgagccccgagcccggcgcctggctgagtagtaagtgca

SEQ ID NO: 2891 - DNA, 87 bp, Homo sapiens
cagcctgggcgacagcgagaccccgtcacacacaaaaaaacccctagcttcctcttctcccagaatgcaggagttaggtgaggaccc

SEQ ID NO: 2892 - DNA, 146 bp, Homo sapiens
ctgcagaaccaccagcagcccaacggcggcgagcccttccttataggcgtcagcgggggaacagctagcggcaaggtacggcggggcccggagccgcgctcccttcccggcttctgtccctgggcggcgcatgtggccggcggccg

SEQ ID NO: 2893 - DNA, 369 bp, Homo sapiens
gcctggcctgcgggggaggtgagggcggggttccccccacactgctgaaaacccccaaaggctgcaagaaagggaaactgggggtagatctcatcccagtaggaggtacacagtcagcgcgtttgaatcaggaaataccagcatccctatttgctatttaagactaatcaggtaaaccccaaagaaaaacacagaagcagccgcatccgctgcagagggacccagaggggagggcaccgcggccacagagtggggctctattctcaccataaggcttagtaactctctgacatttaaaaatatacacaagcattactctgaaaaaacacccaatcgtaaagataagaaggctgttgcccacaaaagacc

SEQ ID NO: 2894 - DNA, 182 bp, Homo sapiens
gggctgactgtcccgccccgcgcttacacccgggagcgtcgggcgggagaactagtgcatgctggctggggatggcggacgcaaagccggaggcaaggccgcgcacgcgcaaacgcgggcgcgccgccgggccgtgctagtgcgcggaagacgcatgcgctggcggcctgcgccgccttaag

SEQ ID NO: 2895 - DNA, 163 bp, Homo sapiens
aaagcgagaaagaagctcttagatttgcaacacatcggaaaaccgggggagcaccccgccttatccgatctccatgctccgcaagggccttccgggttttaggacaagcttctcaatgtcccgtttcgctgggtttaggatccgaggagtccgagcaaaaagt

SEQ ID NO: 2896 - DNA, 125 bp, Homo sapiens
gcctggcgcactcacttccgcgtcccgccgccctccggcccgcgcgcgccgatccgccgccgccatcggacaatgggccgccagccccagctgccgtgaacttcctgccgctgctcggccgcccg

SEQ ID NO: 2897 - DNA, 151 bp, Homo sapiens
tccaagagtgggaccctcgcgtctcctgccgactgggtaggaaacgggggcttcccccttgccctctcagagcgggcgatcccaaagagacaggttaagccgcaggttgagagggcagctccgcgccggtgccccgcggatcctgcaggct

SEQ ID NO: 2898 - DNA, 258 bp, Homo sapiens
gtatccgacctgaacttgggtgggtaattccagaaagttttcacaggagtgaggcagaagacagaaactgcaacaaaccgccggggggtgggattaacgtccaaagctcacaccggcttcaactgattggcaggaacgaagtgggtggagcctcctgaccctgccctcctgcttccgttgctagggacgcttcggccgaggataccgcaatggatcaggaagaggggctgaaggccttggacaatattgtcactcaat

SEQ ID NO: 2899 - DNA, 142 bp, Homo sapiens
cctccgtagcgaacccctctgcggccccggaggattcggaggggcggtggcagccacgcgggcgcacggcagaaggcacggccgccctgcctcctccgggggcaaactgagggacggcggcagcggacgcaggcccgagtaa

SEQ ID NO: 2900 - DNA, 155 bp, Homo sapiens
ttttctttcctcttttggcttatgtcctttaaaaagcagaactccgagagttaacatatcaagagattcatttctgtattcaccacacatacataacattaattgatcgtaagtgttaatctcagtgtgactcatttgatttcctgttgacatgc

SEQ ID NO: 2901 - DNA, 137 bp, Homo sapiens
accaaacgcaccgccttgtactcgtattgcagactacgggcggttacatccgccatggccgcggctgctcggaggcttcagaccaccacgcctccctaccgcaagctgcaaacggccgcagatctctgctcccgccg

SEQ ID NO: 2902 - DNA, 140 bp, Homo sapiens
aagggtggtgtcagttcaaggttggacaggcagtcgctgggtagatgtaaatatatttttgtgcatgtgtaaggttgtggtggactttgtgcaaggttgtggtttttgcagtcttttgtggtcgtgtgtgtgtgtatgtg

SEQ ID NO: 2903 - DNA, 145 bp, Homo sapiens
acagggccgccttcccctggaggcctggggtaaagacgaaatgagagctgagttcacgtgaagtgccccacgtggtggcagtttcctctcttttcctgtgcagctaggtcaccacccacttctctttgtacccagttctctacta

SEQ ID NO: 2904 - DNA, 164 bp, Homo sapiens
ggccatgacagagccacagcacccctgcagctgacacccggcacccaggaagaagcccgtcagcccttcccttccgagacgatcctgaattccaagcagcaccgacatgccagcagggcgagccgctgctccccgcacccagcgcccccggaccccacgctgaa

SEQ ID NO: 2905 - DNA, 354 bp, Homo sapiens
cctctcgcgccgaggcagcctcagcccggcttgctcacttggagagtgcggccggggctggacttggggcgcagcccgggaggcccgagcctgcttggggctgccggctgcagactccgctgtgggcagagcagcttgcttggggatcactacggccgggagaagtctggccgggaggagtccagcacgccttggaaattgaagtattctccgattctggtaatcaggccaaatttgctcaggcaggaagttcaaatgtcacctaattggtttcgttcttatgcttcacttcattttcctcggaaatggaggtcccgaagttactactagtaacttgcatgtaactcattccca

SEQ ID NO: 2906 - DNA, 161 bp, Homo sapiens
ctcgggagcagagcggccccagcggcgcccccgtgcggcccggctctgaggcagcggctcagggagggagggaggccacgtcccgggcacgccacgccacgccacgccccgcccccagattcgtctcgccccagtgggccgcctcggagtcgggtgggtct

SEQ ID NO: 2907 - DNA, 152 bp, Homo sapiens
ctcccacactgggaacagacaaccatttgctctggcagatgctcgtccgtgtttcctccccacttcctgctgttgctcacagtgtccaaagaggttttggggtttgcccgtggacttgaccttgtggttccaaagagagcggggctcagggt

SEQ ID NO: 2908 - DNA, 216 bp, Homo sapiens
cggctcctggtgctcggtgagcgcgggctgctggggcgcgggcgcgggcggcttgggtctggtttttgcggggagtccccgggctgtgctctggggccaacgtcctgactttcggggccggcagcaggctgaccgtgctgggtgagttttcgcgggaccacccgggcggcgggattcaggtggaaggcggcggctgcttcgcggcacccggtccgg

SEQ ID NO: 2909 - DNA, 725 bp, Homo sapiens
tgtcctgatgcgcccatgcctccctgaagcgctgtctgtacccgggcgcaggaactcgtggcggccgggcggtcctgaaggtggaggagcgcggggcccagctggggtacgcgccgagcaagaacccgcacggagccggcgcgccgcggctgggcttcaaggccgccgcgccaaatccctggctgcgacgtgtatgcgaatcgttaggaggaggcgggaggacagccacactgagggcctcttcactaaagaatgaagtctgacggcgggaatgggggtgggtgggggcgggaatccatcagctccacaaagtgacagggcccttttatcgtaaatcaagttcaatctcgctctcgcgaaggtcctcttttttcggcggagctcccgcaggggcgactcgctgtcccagaccagatagtagcaagagctgggagagacccaaatctgcagggagagggcgcgggctgagagccgcggtggggagcagggcctgggcccagcgcgacctgcagggctgctgcctcgggagcgcttctgctctgcctgcggtggccgaggcggcggctcgccgagcgcgctccgagctgtgcgaacagaggaagtatgtgccagttagaagggttccgccggccacctcgtcgcagccgcggcgcaaggtcttggagccgcagacctgaggcccggctcctccctcctcggcttccactaagaacttattaaatagg

SEQ ID NO: 2910 - DNA, 258 bp, Homo sapiens
gacgtggccactgtccaatcctcatgctagaggcggggctaaaggccagtggcgcaagcagaaggaggagcgcagcggctgcaagcacgtgaccggggcctgaagccggaagctacctatctggtagggagctcccccagcaccgaagactgcgatggtgagtgaggacgcatgcgcgagaggacccgccgggggttcagcgtctctgctccccagtctgtgtggtttccccctggtgggcctgcgctccaccctcac

SEQ ID NO: 2911 - DNA, 268 bp, Homo sapiens
tgggctgtggtagctcccagactgcagagcgggcagagcacaagtaggtgggtggggggcgagcctctcaactctgcagctttctcctccgtacccaccgccctgcgactccatcccgcctgatgaggcagacagaccagatggacccaagctctcttcccatgaccccctctttcccagagcctctattgagctggtggaagccgaagtgtcagaattggagacccgtctggaaaaggtgaccctgacatggagaggtgacccagga

SEQ ID NO: 2912 - DNA, 347 bp, Homo sapiens
gtgatcctgaaaccgcttgcccctgggaacgtcgctccggacgggcgtcatctgccacgtgtgataggagccgtctggccaagtggaaaaatctaggctaagcgcagagcacaaccctggcagggtcaagtccgatttcaagcccaacccgatgggattcagaaaagcccgcccagcgtccccaggcccagcagtccacgccacaccgtcggcgacggatttcgtttctattccccgcacgcgccccagcaacgcagaaggagatccagtttcgccacaacgttcccgttggcttgctggtttgaaagttgaagccccggggtagtaaatttggctacaaaatctca

SEQ ID NO: 2913 - DNA, 140 bp, Homo sapiens
cagacgcgccccgggccccctctacaaccattgggagagcgccccgggctcaagcgtggaacggggctgcaatggcaaccgctggaataacggcctcggctcccggtggctcctcaagcccgcaggggaggccggccggg

SEQ ID NO: 2914 - DNA, 178 bp, Homo sapiens
ggaagaggacggggaagttcagtgatggatgggaacaacagtcttagatgatagggataattaagagggcatagttggggacttgtggttattttgcacagctctctactctcagtccaatgtttggaaatgaggatgctccacgtgctaccctaaagaaccatttatgtaagtggac

SEQ ID NO: 2915 - DNA, 123 bp, Homo sapiens
ccgggagcccttggctgcgtcgcccggcagccgcggtgagtgacggcccgcgtatccgctgccggggctgtggcgggcgtgaggggttggccctaccctcggcccccgaccgcccacatccgc

SEQ ID NO: 2916 - DNA, 178 bp, Homo sapiens; identical to SEQ ID NO: 536

SEQ ID NO: 2917 - DNA, 148 bp, Homo sapiens
cttgctgtcgaacttgtgctggggcagcacttcggccaaatcggactcgccagtagcacctggcttcatgatcacccccgcaggccacagcaacgcggcatccacaggtctcgagtgccgaagtccttcaggattggggcaacgtccc

SEQ ID NO: 2918 - DNA, 313 bp, Homo sapiens
ccgaggggcagcgccgggcgcgggcctgggtgcagtgtggtggccgcctccatcaccgcaggctgggcaagggcgaggcgaaggtgggctccgggaccgaggctgcgagctccgctcggtccgagacccgtgcagacgcggctcgagcaacagcaagtccgagttgtacgggcaacggcagcaccttgggctttttcagcctccgacgacgacgtctcgccgcaagcccacgccgtgcgcctccgccgccacggcgaggaaaaagagtcccaccccacccccatcgacccaccctccgcgcgcggctccccgc

SEQ ID NO: 2919 - DNA, 146 bp, Homo sapiens
ggtgctaggagttgccgaagcaagtccggaagctaccgagcgagtccggaagttgccgaaagggagcagcggggaaggaggatggcggatatcatcgcaagactccgggaggacgggatccaaaaacgtgtgatacaggaaggccg

SEQ ID NO: 2920 - DNA, 146 bp, Homo sapiens
agggagaaaaaggccttttgttttctaaccagctgcatttgccggcaggtctgttggagttctacaaaacagcgtgtgtcacgttctataaaacagcgtgtgtcacacagcttggtgctgcatggctggactccctggtttctcta

SEQ ID NO: 2921 - DNA, 146 bp, Homo sapiens
agtggaggtcggctgcccctgggaaaccagagagtcggagggagtccatctggagcggccaagtaggtcggggaagggccgcgcctgacgtctggccgcaggtagccacgttccctccgcccccggtgcagcttcagggcttgcac

SEQ ID NO: 2922 - DNA, 142 bp, Homo sapiens
ccctcacctcagggttcccaatgtgcctccggagggacatattttctccaaccgaccacgttcggggttctagcctcacgggttgcctctaaccctagcttcctacccccacaaccttgttcagccgcctccctataccctc

SEQ ID NO: 2923 - DNA, 140 bp, Homo sapiens; identical to SEQ ID NO: 402

SEQ ID NO: 2924 - DNA, 145 bp, Homo sapiens
tcagtcctgttggatggttgagatctgtgcagggtctgtgcttccgccttattcaaactgtcagatgccagaaccttcgatctttactttgatacatttccacacttattactgcctcacaaccccataggaaatagcagtgccc

SEQ ID NO: 2925 - DNA, 157 bp, Homo sapiens
tgtggtttgtgtgaagggaaaggtgtcaggaaagtgtggcaccccacagggaccccagtgtggggcagccgctgggccccaccgggaataggagactgaggaagaaggcctgcaaggtcagagcccactgatttcaaaacccaagtggacttcattc

SEQ ID NO: 2926 - DNA, 141 bp, Homo sapiens
tgaattactttgagaaaattcaaataattaaacgttcggttgctttgactgtgccttccgtagggtacagcgagagtctgagaagggcatttgagaagggggcggggcctggaagacttccagttaggaccccagcgggaa

SEQ ID NO: 2927 - DNA, 165 bp, Homo sapiens
cggaaccgcggagcgcgccacaggttaacccagccagcggcttccgggctgttgcctgggttaccagagctccgccccacgcccttgcgtatatccggcgagcccagtgcgcaggcgcctcccaaagcctatctcgggtcctgagtctaagggagagaggttcct

SEQ ID NO: 2928 - DNA, 275 bp, Homo sapiens
gagcctctggctatgggaaaggggtctccgagttgatgtgaaggcccaggtcgaggtgtacactgggggcggggaagtggaggtgaccacacgagcgccccatcactgagcgccgccgcgaaatctgcgctctttgggtcacttggagcgcggccagtttggcagatttgtttttttcccggaacaacccgcggcggctcggctgtcccgggaaactgcaaactttgctgtgcgcgttctcccgcgcgcgggctcaactttgtagagcgaggggc

SEQ ID NO: 2929 - DNA, 248 bp, Homo sapiens
ctcgccgcgctcacccgcggctccggctagctggcaggcaggcccgcagccagctccctcgcgctccctctcgcgcgcgccggccacgccccctaggcaccgcggccaatcctcggccagctctggtccgtctccttccgcgaaacccaatcagcatgctcgctcctcgctcgacccgctagttctccggcccattcctcgagctccaccgccccttacctccctcttccaatccccttcggcctttg

SEQ ID NO: 2930 - DNA, 136 bp, Homo sapiens
gacccaaacccaaacctaggcagagttccgtgcgtgattcacaactttggaggcctgcaggtttgggggacgcggggagggcggagggtcccggacgcggcgcccccaaagggcccctgggtatcagtctagtagc

SEQ ID NO: 2931 - DNA, 162 bp, Homo sapiens
cggttttacagtgtggagcggggaaagaaaaactctaaggtcctcgctgcaaagcaaccatcagagctccgccgcgccgtgccgctcctctccgccccgtggtccgggtgtcaccgcccgcaggggcgcaagggccgcagcacgcgtgcgcagtgggcacca

SEQ ID NO: 2932 - DNA, 153 bp, Homo sapiens
cgccccctggtggaaagtattgtagcgacagccaccgcaagctgggtcgccgaggctggctgttggggtcacgggggctgtctttccccttaccacttgggggtggtattagtagagtccagaggaagaaggagcacagccctgcacagagtc

SEQ ID NO: 2933 - DNA, 206 bp, Homo sapiens
gtgtcagggccagctgtgtagtggctcggtgtgatttgttagctctttgaggcagggtaccctcctcaggatttcgatatgcaaaaaatcaaatctctcatgacccgacaggtaagtcgcggcggctgaagcaaaggcttccttcatctcggaagtgagaggagccgagatgttctgtccccaaccagtggcgggcggggatctaa

SEQ ID NO: 2934 - DNA, 145 bp, Homo sapiens
tctccgtgctaggctgcgacctcaagggctgccgcgtcggggatcggaagtggtcttcaaagaggggtctaggtcgcgaaatcctggcagcagccgaagtgaaaaggagctgctaggaggcgggcggggggcagtctgatgtccg

SEQ ID NO: 2935 - DNA, 214 bp, Homo sapiens
tttttggtaggtttttatcaacaacgagcaaaacaaaacatattgtacttgcaggtttcacaaacactcaaagaaagagtcataagaactgaaattacagcttgttttccttcccgccctctccacccagggaaatacaatttcccaccccaacactctcgcttggctaattctcaagtctgaagaggaagatactttacgtaagcaggtcagc

SEQ ID NO: 2936 - DNA, 138 bp, Homo sapiens
ccaatgcccgtgccggccaccagagggcccttcagtgcagagatggtcggcgcggcctcaccgcggtcaggagcagcgcgaaaccccctgtgccctcggccgcctgcagcatgagcctgcacaggagcccccgacacc

SEQ ID NO: 2937 - DNA, 148 bp, Homo sapiens
cacagtggcgctcctagctttctttttacggaaaggaggaaaggtgcttggcaccagtcggggaagctcacgccaagtgaccgagaccagaactcgctctcgaccggagccccccaagtctggtgacttggaggaaggaggatcccga

SEQ ID NO: 2938 - DNA, 315 bp, Homo sapiens
ccagcacctgggcgccgacctgcgtcagcagcctccaacccggcatggattagcccgggaagactcgactcacgacttccgggcgccctgccgctctgctttcagggagtccccacgccaccgccacgtggacgcagtagccgtggggaagttttcgcaatggccgccggaacggtcgccggccgatgctctctgcgacggaaagaaagccgccggacccacttccggtgcgttttacaatgaactccgggcactcgagtcgctccccggaaactatagttctgcttccaccgttgtcctactttggatgtgagt

SEQ ID NO: 2939 - DNA, 124 bp, Homo sapiens
cgggatgtgcggcgcttgctgctgcagccaccttttcctgcagtgctcggggtgacagccggtccggagcgcgggagggtaggggagcgggagaggagggaaggtgcgtccacccacctgtccc

SEQ ID NO: 2940 - DNA, 240 bp, Homo sapiens
gctgctgtgcgagtgggatccgccgcgtccttgctctgcccgcgccgccaccgccgccgtctcccggggcccccgcgcacgctcctccgcgtgctctcgcctaccgctgccgaggaaactgacggagcccgagcgcggcggcggggctcagagccaggcgagtcagctgatccggcccaccccgctcggcacccgagagagacccctagcggcgccgccggggaactgcgcccgctcgcg

SEQ ID NO: 2941 - DNA, 217 bp, Homo sapiens
cacctcacttttgaccaaaccaccgttacgagaatacctattgaaaacccttacactgttgctgtttccctgggcttaaaagtatgtttggttttgtcagtacctggaaacaggaagttgagatttgaggagaaatctttggcagttgtgcactaagcttgcgggagttaggagtctgttgccacggaaaccacactgctgcctcatttattaatgg

SEQ ID NO: 2942 - DNA, 146 bp, Homo sapiens
tggtgtctctggaggcccttcctgagaagccgtcgccagagttacgtcgcggttttcttaactttagagcctgggggccggagaccctgattgcactcgacctggctctgccctactctctgcgtgacttccagtaaggtctttcc

SEQ ID NO: 2943 - DNA, 139 bp, Homo sapiens
accccgcgcgtccgtcacctctgctgggaacggcggcagggcccgggggtgggaggcgttgtggcggtggcgtggcggtgggctctgggcctggcctctgtgctggttcgctggtgtgacctggggctggccacacgac

SEQ ID NO: 2944 - DNA, 134 bp, Homo sapiens
gctgcccggggtaaccgtgcgtgcccaccgcggccgcggccgctgctgcgtaggcgccggggcacagcaggacgcggctcgtggggaccccaggagggctgttccgtggcgcttcattcacaaaaaagggccca

SEQ ID NO: 2945 - DNA, 244 bp, Homo sapiens
agcagggttatcttcagacagcaggacgtgcaaatgggtgcagacagatctctttgtgggcccaggcaggaagctgagggttcgcatctgatggtatcaatttttcctctgagacaggagaggtgggctacgtgcaatgaaactgcgggttgtacatgatgaagacctgaaggtcctccaagagaagtgcaggaagaacctgaccagcgcaaaagagcagcttcctctcccagcacagatgaca

SEQ ID NO: 2946 - DNA, 95 bp, Homo sapiens
aagactgaaaagactggagatctctagagggttccaagaaacttggggggaattaagcatttcacgtaggaacagcacgttattgggagtttacc

SEQ ID NO: 2947 - DNA, 146 bp, Homo sapiens
actgagagagcatttctgaaaccctgcacctatcagttaattggcacatcgtcctcaatcatttgggtccgcaagggggcgtggaggcaccttgtcgggctgccttgaggctgtgccaactccccgggctcgcacgttttgggcag

SEQ ID NO: 2948 - DNA, 138 bp, Homo sapiens
cccgacccctaaggtgagggtggacgaggctacaacggcctgctcccgagcgtcccgggactgcgggcgcaaaacagctgggcctctctggccacagccgctcgccggacgcccgaatccattgagccgacggtgaac

SEQ ID NO: 2949 - DNA, 142 bp, Homo sapiens
gaatcagacagaaaatccagaaaagccacgttatttaacagaaccctacaaggtcagctttgagtcaaagcaggtaacagtttccttcgatgttttcatggacatttttattcccaaatccgagttctcgccaattctctaa

SEQ ID NO: 2950 - DNA, 855 bp, Homo sapiens
tcccagatgtagcggaacctatgggctgcgtgcagcaggcagagggcttctcagagaggggcgctgggcagttgcggcggcggaggtagtgcagagcaggaagcagcgcggaagcacagcgggaggcggagggggacgcccagcctcgtcaaggtcttcggccaccccgcccgggaggctcgaaactggctttggggtacctgaatgcctcgactcccagggagacatcgggagctcggagccactctccctgtggcgatggcacctgcctcaaggccgtctcgcttgctgatgcctggccgggaaggaggatggacgccgctggcatgtgccctggtaagtgtgtctgtttgtcatcagtgtacattctgcatgtggcagcagggcgagggggaggcgcacgtgtctaaagtgcacggagccttcctctacccctatgtatatacccttcagtcaatgttccaagaagcgggtcagggcggagggtatccatctggactctggaagggcgtgggtttgacatcggtaggtgtgacaggaaagtccagcctgtcagagttgggctctacagtggccgaaatcaagaaaggatggacgtgtcggcccagggctggcctgtttccggatatgtcacgggggtgcctcgttcctcgaggggagttttaggatgtatctttttttctcaccctctcactgaactgtagggttctgagaagaggttctaggaaggagagggctgaaaggaactaagaaaagaacccaggagagtggaacatggggtaataaaagacagatgagcacagttgggtgtgtgtgtgaaaccgtgatccacctggaaggggttccaaaccctgg

SEQ ID NO: 2951 - DNA, 144 bp, Homo sapiens
aggttgtggcctccagtattccccctaagagatgggatctttgcctaaaagttactgagaaacgaaggctgcaaaaagccggaaaatatcccagcttttaaggcacactgacagccaaacagaacgctctttccgtttgcagtt

SEQ ID NO: 2952 - DNA, 157 bp, Homo sapiens
ataccttgggaattgtgcttaaattgcacttgcaactcccctggaagttcctgaaacttcccgagaatgaggcggggcggctcaaggggaaagggcagggaggagagaccctcgggaagctgatgacgcgtccggggcaagtcagcctgtttccgag

SEQ ID NO: 2953 - DNA, 139 bp, Homo sapiens
ggcaggacgatggcggaggggaccacgagcccgtcccttccctgagaggccctcctaccaccgccgtcccatgcccccgcgacgacccccaggccgaaccccaggccccgggccggcccacagccccgggcctcgcggc

SEQ ID NO: 2954 - DNA, 120 bp, Homo sapiens
cctgtgcccagtcaatggctgttccaaattagggtctacccatctctatgcagggctaaagtccgcgggcggccccgcaccgctaccaaaagtacagtcctgtgcgcccagacgcgacgc

SEQ ID NO: 2955 - DNA, 236 bp, Homo sapiens
gcgggcgcccagagcacggcggaggaggcggtggcgctgcagcccccgccccgtggggtttactgggtagccatttggcgcctctcggagggagaggagccgccggggctggaaaaggaggaggagcggggccgggcgcacgggcaccgctgccacgccggcagcgcactcccaggctcctccggccgagtttgcacaaacaaaacgccctaggaaaacttttcccgaagagaagt

SEQ ID NO: 2956 - DNA, 146 bp, Homo sapiens
aacatctcattctttcgcaatccagataccaacaggagtctgaaacccttcgcagaggcgtgcaacacactaggagagcgctatctgtttacaaatacgaatctcagttacccacgtcaaaaccgcgcattaccacctttcgactg

SEQ ID NO: 2957 - DNA, 157 bp, Homo sapiens
ctgagcaaaagctccgcgggtggagaaagagagtatggcgggggccacgggggtccgagtcccgacacgcggctgcgcactcgctcccctgcaccgcgggcggggctggggccggaaacgcgcgcggcggcctcggattcctgcgcggtgggacaag

SEQ ID NO: 2958 - DNA, 146 bp, Homo sapiens
gccgtgttactggccgcccctagggacctgcagcgccgttcggggcagcagcacttccggcggggtcgtggcctggagcgcttccgggtctgcaaccccgccgtctgcccggccgcagcgccacctgccggccgcatccgggagcg

SEQ ID NO: 2959 - DNA, 147 bp, Homo sapiens
cggccccggacggcccggctgctgtgcagagaggaggccgagtcggtaagaggcggcggcggctgagccggcaggccgcctggcccccgccgggccgcccgggacgcccccattctggtgtctctctttccggcccgctcccctccc

SEQ ID NO: 2960 - DNA, 149 bp, Homo sapiens
gttttcagattctgatacaggcttgcatctgcatcgtttttagtctgacaaagagaaacactgctttaggaagtgggtcatgtgggtgtataagtggttcgtggacaggccggataagccgtggttctggtcagagtaccactgaaaca

SEQ ID NO: 2961 - DNA, 147 bp, Homo sapiens
tgaaccaaccccaaccccgaccccgacgccgatcccggccccagagcgcctcctaggcgacccctggccccacccacgccggagccggcccgcgcccatccccacgccccaacccgcaccacgcaacatcgccctagcgcctttcgg

SEQ ID NO: 2962 - DNA, 267 bp, Homo sapiens
gaagcgacgttgctggtaatagaaggtaattcagtaccagcctgggcctggccgcggtgaccgaggcgggccgcgtcgcggagacttctgggagtgcttcctcgctctccgagtgcgcaagcgcagcgcaccgagtggacattttggtctttgtccgcgggtcagtacggcccctgggtccacgtggcgcgaaagtaggaggtgggatctgggcgtctcgggtcggtcggaccggggaggttaaaggggaggattcctgatctttag

SEQ ID NO: 2963 - DNA, 160 bp, Homo sapiens
ggctcagcagtccccagtcagcaagaggacgatggggagcagaactgccttgcaacctgtccagccacagtttcctcaattagaggctgttaacgcctgctgtgagctgacaaggccactgagaaagccccagcgcctggagctggtctgacagttccca

SEQ ID NO: 2964 - DNA, 149 bp, Homo sapiens
gcagtcatggcgttaagagcaggaagagaagcaccagaacccggaagagaaatccagtcctctgctaggccttgcaccgtccctctggcgccctctactgacaaagccagtaaaattgtgccgctagcaaaggagatctttttatggga

SEQ ID NO: 2965 - DNA, 354 bp, Homo sapiens
acctgcgggatcgcccctacactctggcgcgctgagggcggtgagcgagggcgccaaggcacaggtggggcgggagtcgagcgcggaggctcggggggcgggacgcggggcctgggagcggccagggaccgcggcagcgcctcagtgccagcctggcgcccgcgactgcctgccccagcccctcagtggcggcttgctctcttctctcgctccgaaccagacacagccgctgccgctgccgtccggcgcgctacagactcccgagaacagccctggctgtcagcgagcaccagccgcttcctgtccccatcgcggagactggaggggcgcaccacggccatggagccagaggcg

SEQ ID NO: 2966 - DNA, 147 bp, Homo sapiens
aagaggtttgcggacaagggaggacagaactcacggcaccccgtcggcagaggaaggcagcggcgcttcccgcgtgcacacaacagtccctgcggcccgcacacccctggctgtcatcggggaggccgagtcctgctacctgtcctg

SEQ ID NO: 2967 - DNA, 154 bp, Homo sapiens
ccaggctggtttgctgaagtataagagaccgatggctaaatcatctctgttaccccagctgtgccaagccaaccagcatatatatgtgagtgaggccattgacgaccagctgacggcagacacaggagagaagccagccaagaccacatggagc

SEQ ID NO: 2968 - DNA, 330 bp, Homo sapiens
acctcttgcatctcagtgggaagcagtgtgatggggtcagaagtgtaaacttgcgcaacatcctgctcccaagaaagacgtgcacttgctacttcatccttcgctccatcttggtcctcccaactggagagaggacagcctagacgagacttcccacaaccaagatggcggccgtgcactccttgcccacagctggccttttctccactttcggtctccatcgtaacgcggctggctctctcggcgccggcttaggccttgcaagtagggaaatggtgagtctttcccgccccctcatttttgcgacagttgcagcgaaagtcacggcag

SEQ ID NO: 2969 - DNA, 149 bp, Homo sapiens
gtggagttgcgcactacctcacgggagaggtagtccacagccctaagcctttccccagctggagaataaataaactacgtttcccagaaggctgtgggattgcgtcacaatgactgcgggattatagaagcccggggcatattgggaaa

SEQ ID NO: 2970 - DNA, 306 bp, Homo sapiens
cgttttgattggtttccagtgtggcgcgggggtctcctgggatccgaaagaacctgcctttccgcccggaagtcggcgtcttgagtcataggagtgagccacgcccgggctgtgggaataagatggcggggaagaagaatgttctgtcgtctctcgcagtttacgcggaagattcagagcccgagtctgatggcgaggctggaatcgaggcggtgggcagcgcggctggtaaggcccaagtgcgaagctggaagggggaatcgggtgtctgcccggaatgctgtaccctcgctgggcgggagggaa

SEQ ID NO: 2971 - DNA, 140 bp, Homo sapiens
gcggctgcgtgtagtagttgtccaggagcaccccgccggccgccagcgcgtccaggtgcggcgtgcggatgcgggagccgtggaagccgacgtcgttccagcctaggtcgtctgccagcaagaagaccaggtggggcggc

SEQ ID NO: 2972 - DNA, 153 bp, Homo sapiens
taaaagtgaaataacccacttgctcccaatattcctttctatatctctaccccagctcgcctgctgctcgtagaaacaaatatactacacgtacgctgtcctaggatgacacaacaccctcactactgcagaagacggatcattaaacaaacg

SEQ ID NO: 2973 - DNA, 309 bp, Homo sapiens
tatctcctgatgcttaacaatcgttgggtggaaacattccctggaattatacagctgttgcatttgatggctcataaagcctcagtaaagtccgtcaagggccttttttcttggcgagggaccattcttctcatgcggttatgatagcatctgcttcctgtccctggaagtgcacagaatccacagacactggcagacggaagcaggggaggagccctactgcagaggcatctggccctttgatggcttttgggtaacttctgatctacagggcatcgtatcaaaatgcagactgagatttagtgggta

SEQ ID NO: 2974 - DNA, 139 bp, Homo sapiens
aagaacccaggtctctcaaacagcagatcctccaccccaggatccctgaacacagcggcatcgcctcctacctcggtcgggaagcccaccccccacccaccagaccgaggattccaaaagggggcgaaggcggagagca

SEQ ID NO: 2975 - DNA, 772 bp, Homo sapiens
gaggacccaggagtggtccattctctcgatggagacccatttgggaggaagaatctgagaatccttgagaattgtgttcaaaacgttgggtatatgagagcgcgtgctttccaggggaagagcccacggttttcaccctatggacagcccccgaatccctaagcttttgtatttttgagacgtttaggagctgctgggctagatgagggtccaggggtcagaaacctgcgtatagcaactcacctgggaacccccgcggatctctctctgggttgtaaagcggccagactagtgcgctccgaagctgctcaggctccggggtgctgcccccttccccgaagtgcagccttgcagaccccggggctgggaagggggcgggagagaggcttgcatcttgcagccctccggtcccacggagggcacaagctgctcgctggctgccccaagggaggagtgcgaggagtggcgagggctatcagccctggtgggcgaacctttcccaagaggcgctgcttgctccggcggggtaaagccggacgaggcgcgagagtggggtgggtgacgcgcgccagccacggagaatgaggctcgctatctgcgccctgctgtgcgccggggccctgagtaagtgagcgctgggagtcgaggtgggggccggcgctgcaaggtgctccggggaggcactgggtgcaagcagcgggtcggtcacagcgggaccctgcgcgacaaccggacagtcagcgggcctgcggggctgcgatgcacccctgaa

SEQ ID NO: 2976 - DNA, 137 bp, Homo sapiens
cagggctagaaacacccaaatcaattcctcagggagcgaaacggcagaggccggcagcccgcggcccacgtgcacttgctcagggaaccgttccagcgaaacctgacccggatcggaatcctcccgcagcacagcgg

SEQ ID NO: 2977 - DNA, 141 bp, Homo sapiens
cccgaaggtacttccttaggccggcagtgtcgctacggtggtagccaggtgagcacgggcacagtcccggggcgggggcgggtagagcggccctctctcgggagctccggtgggtctgcgaacctgccgggagcggaaggc

SEQ ID NO: 2978 - DNA, 265 bp, Homo sapiens
ggctgtagacatgatccctcgcggcgcccggtggggccgggaacggtgccacccggacaatccgggtgagacccgcgcccacccgcctccggaccgaccctcagcctggagccgcgcagtcctactacccggcgatccgtggcgggggtagaggcagcggccacagccgtgtccggctctggctccgctgcgttttccgccgacgggccccgcccactacacttccggttccgggctgaaatcggaaacaggaggagggccgtaa

SEQ ID NO: 2979 - DNA, 317 bp, Homo sapiens
cacacacacaaaccgaatcttgaaaaactagacgttgcccagctaccagcccccgtctggtttccataggaacgcgcaattccgttgcgtagccctctgcgccggtagttgttctgtctcagttccggttttcccttccaagcgtcaatgtttcttgttcccaggcggcagctagagcagaaggcggatgagttttggacagaagaggcttccgttgaggggcgtggcgacgcagccgcggtctgagagaccggttcacgtgcaggcagcggcggatcatattccttcatctaccatggctcagccgggaactctga

SEQ ID NO: 2980 - DNA, 635 bp, Homo sapiens
aaaaaaaaaaaaatcggaacataagaaacctcaggctgtcttcgattactgttctagagaaactttatgtttacacgaataaggaaatgagtttttgttgggggttgaggaggaaggaaagtcatggtgttctgacgtggaaaacttctttaaaaggctgcttagtctttagtttgaaaataaaccaaaaaggtttaggagtcggggaaaggccctaggaaaatccagacagtggtcacgtttgtggacgacgtttagagcttgctatcctgggcacacaagaacccttggactgttcggtgcaaagttggcaaatcctacacggcctgtgccagggtttactttctgcatcaatttcacaggcgtccagcctggctgaggattttttgcggtttttaactggaagggaaataagtcggcatcagcacttagggctgcttaacttttaaaaggtggtagaacgcccagccttacacgctgctgcttaaattctcggtgctcaccaaggctgggctcgtgtggcccaatcctgcaatccccgaggcggtgtttcttaaagagtgggcttgattctggttaaacccattaagaagtcggaccccgggctcgtttcttgttctgtaattatgggtaaa

SEQ ID NO: 2981 - DNA, 149 bp, Homo sapiens
ttggtcatgctggtttacggaggtggtcagtgacacgcctaatttcgttggaaactagaattacgtgcggagatttcgtcgaatagtgcctattcgcgttccgagggcacatcttatgcatagttagggctatcagctttatgatatgc

SEQ ID NO: 2982 - DNA, 200 bp, Homo sapiens
atccagtgttcccgatttactaaaataggtaaccaggcgtctcacagtcgccgtcctgtcaagagcgctaatgaacgttctcattaacacgcaggagtaccgggagccctgaaccgcccgctgctcggcggatcccagctgcggtggcgacggcgggaaggcgctttccgctgttcctcagcgggccgggcccttgacca

SEQ ID NO: 2983 - DNA, 169 bp, Homo sapiens
ggctccgcgctcgcactcccgctcctccgcccgaccgcgcgctcgccccgccgctcctgctgcagccccagggcccctcgccgccgccaccatggacgccatcaagaagaagatgcagatgctgaagctcgacaaggagaacgccttggatcgagctgagcaggcggag

SEQ ID NO: 2984 - DNA, 1140 bp, Homo sapiens
accacagctggcatcccaggggttaatttcggagcagcccaggtggaggtcgagcccccagccccgtcggcacctccaggcttccgaggccaccggaacggaggaggcttcggtggctctttgtctacctgctctgggtgttaaagagcccgctcgcagcctgcatcgccggggctcgggacagaagtcagcggcggggaaatggggctctgtcactttaagtacagctggagccgtaagtacaagccctggtggtggggagaaaagggagcggagggcaggcgagggttaggtttccgaccctccgcgtggcccacagctcataccttttcgggtgtccccgggtgtcaggcgagagcggtcctggggggcgctgggtgcccacccggtgaatggccgcctgagccggggaagatgcttcatctgcccctgcccagatccggaagaacggtgaatttcccccgcaggtaagcgcccccacccccctggcctcaccgccagaccgcagagctggggtcgggtttgtggcacccccagccccgccgcagccccccagttccgccgcagctgcagtctcaggggcagtgggtgtggggtccgcaagaaggagggtcttggccgcgctcgcttttccgccagagaggagtgcctgcgccgccggagcctccgagctcctggacgtttggcttacgggcatctggggctgggagtgggtgtgtggagggctctagggagtggaaagggaaggaaaggagcttaggcgcccaggagacctggacggagctgagacaatagcgcaacttgattgaacttcgatggttgcggctgtggcgcgtgggggcccggcctgtgagggtcgggggtcctggggaccaggcgggtggaaggaggaggggcttgcagccccaggtcggccctgccaaggtcaccctagttccggaagctccgggggtcgtcctggggtgaaaggaggtggtgggaggcggaaggatgaaacgggggagggaggggacgttgaatttgtgaccgtactgctggctggatacttccgagagagagtgaagcctggtgctctaccctgggaaggggtgaaaaatcggagagccgggtaatttggggagacgcacagtgagggactgg

SEQ ID NO: 2985 - DNA, 146 bp, Homo sapiens
gtggcttgctggtagcttagcccggcgggggcgagtccggcttcaccgcgcccggcgcgcgcgcacgcaccccagaacccgaatctgcacaactactgggcaggcgtctctgcgggaggccaggagacccgcgtcccggtccgggc

SEQ ID NO: 2986 - DNA, 145 bp, Homo sapiens
ctcgggaaagagcgctgcccggctctgggatttgggaggagctcggaggccgctcgggcacctcgctggacactatccgtttgcgccccggtggcgcgggagggtccggagcggagcgctcgtctctcctcagcggtttagtgga

SEQ ID NO: 2987 - DNA, 142 bp, Homo sapiens
ccgagcttaacatgattctccactgcagctgcctctttgaagcggatccgtgaagtagaaatttggagacgtaagctgacgtggaaatctatccccatccttagcagggaggtgctggtcatgtgacccgatgttgaaattg

SEQ ID NO: 2988 - DNA, 144 bp, Homo sapiens
agccagcggggcagcgggctcggggcccctgggcggcaggaacggcacgtccgctaggagcaggcagggtgctcgagcggccgccggcggctgcgtgccgaagccacagaggaggccgagtcccagcggtagggccccacgcgc

SEQ ID NO: 2989 - DNA, 217 bp, Homo sapiens
gctgtgtcgtacgtttctgccgcggcttttctatggtgcgccctggcccccttttcgcttccctgtcagtccgagcgcgctcatgcacgcacgtccagcttgcttggcgccgtggctaacactttgcgcgctcctgcggagggcgtcgcacggcacagcacagcaaagctgcggcccaacctgtccccgctgagccttccgcccaggccacccgcac

SEQ ID NO: 2990 - DNA, 212 bp, Homo sapiens
ggtcaggggaaataatatgaatctgacgctggggacatttgcaacccgcagagtcaccgccacctggtgtctcttcagtgtctatggagaccagtaaatgactgtttgctccactgttctgaaaacaaatgagtgcagaaacaatcttcttttgcttcctgcctggtgagagacatgattgccaagagctcaggccaggagccgagggtttg

SEQ ID NO: 2991 - DNA, 453 bp, Homo sapiens
cgagcatcgggagagcggtgggcacggcaggggcggaggccaagggcgaccacccggcccagcagaagccccgggcgcgggcgcggcgtctacgcggccgcgctgcagggctggggcatggcgtggcgggcgcggtcggcgcggggctcaccggacttggggtaggtgacgatccacacgtcgctgggccgcaccgggaagttggcgatctcctccatcttcccgcggcagaagggcggcagccgcacgccatggaactcgaagtacttgctctcgaactcccccggggtgctgggggtctcggcctcgctctccgccatgccgccgccgtcgccgtcgccgccgccgcctcccggctcgcagcccgcacgcgcccgcgcccgcgcccgcgcccgcgccccgcacacgctcgcgccccaccggcgcgcggcggcagctccgcaggcgtgacgt

SEQ ID NO: 2992 - DNA, 192 bp, Homo sapiens
ccagcttgcgtcaccgcttcagagcggagaagagcgagcaggggagagcgagaccagttttaaggggaggaccggtgcgagtgaggcagccccgaggctctgctcgcccaccacccaatcctcgcctcccttctgctccaccttctctctctgccctcacctctcccccgaaaaccccctatttagccaaag

SEQ ID NO: 2993 - DNA, 146 bp, Homo sapiens
tcaaaagcgacggggctctaaggggcagggcctgggctggggccttggctggtggctccagactgtgggtggggctctcgggggcggggctctcgggggcgcgtcctcgggggctcggccgggttccgttgccaccaccgtgaggg

SEQ ID NO: 2994 - DNA, 137 bp, Homo sapiens
tttctacttccctaggcccaagcctgcccgctggcgtcgaagccaactccttactggttcaggtatgtgctcgtctctagagtaaaccaatcagagccccacttcttactcctgggatttggtaaacggaagagacc

SEQ ID NO: 2995 - DNA, 309 bp, Homo sapiens
atattcaaataccaccagacggaggttctgcctaaccaaaagtaaaagcagaaaagtttaaagctgaattgtgccctgcacacaccttgagattgtaggggtgaaatgaatggtcttgggccggggatcttgctaaaggcatgataaatcatgcgttgcaggcaaattaagacccaggctctaacttgaacctcagactgtgccaaactccatctccatttaaggaaaatggttttctcagtttcttgcacatgacctaaaggcttgtccagtcatttccgttgtctgaaatgcaaagcaatctttctt

SEQ ID NO: 2996 - DNA, 307 bp, Homo sapiens
catttcacagcaggaagctgaagtcaccggaggtctaaccggagggtggcagcgggcccgggcgaggtgtggaagagaagtgacatttattgacacctgctctggtacgtcaggtgtgatgacgtacaccagcttgtgcagcttgccacggcctcgataagagagacaattctggccgtgtgtgacagacgagctggcacacgaaggctctgtgagcaggatgtcctccctggtcgctgagccccatcaggcttgcagccaagtttccacggctccaaagctggggtcttgacacatcaagcagctg

SEQ ID NO: 2997 - DNA, 221 bp, Homo sapiens
cacccacgcggccgcccccggccctgcccgccggggacgctggcaccgaggatgtcctgcccgtggcccaggtccccgccgctcaccaggtacttgccgtccggggagaacttgcagagtaagctggagagcttgaatacctcggagaagttcatggccgccgcctgccgcgggcgccaccctgcgcccgaaaacccgcgggacccctgggcgcgcagcag

SEQ ID NO: 2998 - DNA, 136 bp, Homo sapiens
ttgttgttgttgttttaaactccctccaacagacacaactatacgcaaacgtacgctacaaacaattaaacggaaatacttagcaaccacccatccaggaaaaaactcacggtgctggggagcctcgtgggctccg

SEQ ID NO: 2999 - DNA, 150 bp, Homo sapiens
tcgggggccgcgtgcccagcctagcctatccggactgtgcgggaggcggacggggagcagagacacaataaaaattcccggtcaaacctcttcgcgcgtgctcctctgcagcattcttcccgctgatactgactacagcagctagggagc

SEQ ID NO: 3000 - DNA, 159 bp, Homo sapiens
cctaaccccggcccgctactcacggttccagtacaccgggtagcactctccttgggtcacatccacctcgtagaggccgccccgcacgcacacaggctcgatgttcacaagctccaccatctccggctcgtgccccgtcgtactctggcagaagccgca

SEQ ID NO: 3001 - DNA, 153 bp, Homo sapiens
ctccctccatccagacagactcaaaactgcaagcctgaggtggaacatgctaagtgccggttggttcccaaataatcctacctgaagcttctacacgattctagagatggagttttgcttgctgatgacactgaaaaatcatgtgaaaagaaa

SEQ ID NO: 3002 - DNA, 279 bp, Homo sapiens
gttcagcaggaattgccaagtcaaatacagccatataaagccccccttcgacgtgccaggtgtgcctccggagagcagccaccaaaaccaccagcagcccgtccgcgccgggaaatgcgccctcgctggcttacggggccactcagacagttctaagtgcctttccctgtaacgcagaggcacacctgccttccctcgggaaacagcggcccgacgtgcgcccgcaacgcgtaaagcgtcaacagctgaaaccctcggaatcctccccgaacagaaaca

SEQ ID NO: 3003 - DNA, 158 bp, Homo sapiens
tgctggagctcctgcagctgcttttcgcgggtgggttgcggctccggatccaggatgtactccgggaacagaaaacgctcctgcatgtcaccaccttctccaaagccctccgtgtccacggggtcataaggaagctcgcgtcccagactcgatgagtg

SEQ ID NO: 3004 - DNA, 152 bp, Homo sapiens
ccccaaagtgagacaggccgggaggacccgggcgcagtaggagtgcatcaggcggcgcccgagatggaccaggggctgcgtcccgcccgcgccgcctctttgagacccgggtcgtctgttccacgcggcggttgcggcgactgttggtggtg

SEQ ID NO: 3005 - DNA, 144 bp, Homo sapiens
ggtgcctctgactgaaatgcagtagacagagcaagacactgcagctttgcagctgcggagaggtgggcgctgttaataggcacagagagacgctgatactggcgtgtccccagaaaagccagggtgcccgacctccacagagtc

SEQ ID NO: 3006 - DNA, 146 bp, Homo sapiens
tatttttgggtcgcggagaattgtggcccgagaaggctctgctccttgagagtgtggggagagaagctgcagtcccggaagcggttttagggggccgcttccttggcctagaggagctccccaacccgagggggcaagggaaacga

SEQ ID NO: 3007 - DNA, 150 bp, Homo sapiens
gcctccgaaagtgtcggaattacaggcgtgggtcaccgcgcccctcccactgaagttcttcttcagccaatcactgctcgaggcttagagcctacccgcgagccgcgcccagcaactgcccagcctttctgtatgcaagccattcggctc

SEQ ID NO: 3008 - DNA, 140 bp, Homo sapiens
aacagccatcgctgggtttttcccatagaaggatgaagaccgctctgacggtgtggcgctccctctagtggctgagagtcgctaactcaccggcgaggcttcccaaggccggagggcggcttctcaaaagtttgttccag

SEQ ID NO: 3009 - DNA, 143 bp, Homo sapiens
gaacctggctccaccagcccttcctctaagacgtactgacaggaaatcataaataaccaccttgaaaccttcgtcacacagtgtcggtgggatgttacaccgtctccataaccactcagtcctgagtctctttgaagcccttt

SEQ ID NO: 3010 - DNA, 205 bp, Homo sapiens
caggggccccagagaggacggtgagggcggcggcggcggccccgcggggcccggctccgcctcagcccccgacgcctgctccccagctgcggcaggcccgagtgaggccatcctccagctgcgcggttgcccacgttatggacaaaactccgccgccatcgcccaggccgcctccggaggccggcgctgcctccctgccttccgg

SEQ ID NO: 3011 - DNA, 171 bp, Homo sapiens
tgagttggacgtgggcgctctttacccctttagtcgctctgggtcgcgagggcggctcccaagattccgcaactacgccttcgcgtcctcctggtcgacctcgtatagtggatatcgctaccatcgtcactgctatgcagaagaacggcagtcagcggaagactacgagaa

SEQ ID NO: 3012 - DNA, 146 bp, Homo sapiens
aaccacgagaaaaacagtggagtcaaacggcggtaaggactgacaaggctggcggggacattgagcaaacggcggcttctgagttggcaccagtccttcaccacgttgtgtgggaagtgtggggagtcaggattcccactcctccc

SEQ ID NO: 3013 - DNA, 146 bp, Homo sapiens
gggggtggccgtctgagagcggcccggagcccaggcggggagagtgtcctggcctgggtggaaccctgggaggcgggggcgtcgtggctggtgtgccccactggcgctaggccgtggattgcttggtttccagaacatctctgcgg

SEQ ID NO: 3014 - DNA, 194 bp, Homo sapiens
aatagttccggcgcgggtgttgagagcggtgtggcaggtgttgtagccgctatggtgaagttcgctttgtagcggccccggctagagagttgttctgttccctgcctttgtgacccggaggagcttttggggtgcgtcaagcccctggcctgaggcagcggtgaggcgtgtgcgtgagcacggccggttgggcc

SEQ ID NO: 3015 - DNA, 353 bp, Homo sapiens
cagggccaaggccagccctccgcctcgaggccactggtgcttgggggtgggaaaagagtgaccgggggcaactgagcaaaacatagaacagaaactccctctcgaatagagacccacgcacggaaggatgatacactgtgattccccgacgtgggcctgcagcaagagacgggtgctaacagcgtccgagccaatccgtaagcatcagagggacaaagaaatcataaacaagaggcaggatgcaactgcttcaacgcagaaagaatgagtcatccaggaaggcgaggtggtggcgggttggctgtggttttgcagaggcgggcaggaggggcagggggccagggagagggcag

SEQ ID NO: 3016 - DNA, 147 bp, Homo sapiens
tcggagagcggccagagagccctccttcctggctgggctcccaaaccgcggttcagatgttgtcttgtgagcgtgcgcgcgcctggctggaggggcactgagcctggccgcagtgttgcgtaagtagggcctgaggagagaggcagg

SEQ ID NO: 3017 - DNA, 160 bp, Homo sapiens
agcggagcccagccccgctcgggagcgggcaggagagacagggtagtgacccccactcacaccagaaaacccctccccccggcgattttgctgccaactcgagtcggctacagacagtccagtgagtccttaattacaaggacgagagaaaagcacggtg

SEQ ID NO: 3018 - DNA, 190 bp, Homo sapiens
agtggagtgagagctgaagcgtctccctcagtcttaaggaggcaagaggcatctcaagcctcgctaggggtggtcgctgttgcagagcagtgaagtcggctgcccctatgaggaagcagtgagttcctgatctgtagcagcccagcaatttcaccgttggaggaagtgggcactggactcattccagcag

SEQ ID NO: 3019 - DNA, 861 bp, Homo sapiens
gagggggcgggaacggtcgaggcactgagagtgggggatgagaaacgaactccgtcccctgcacagtcagtgccttcgggggctccaccaccgcgcgctcccaccctcaaggtttggactcctaggggagggagaggacgggagggagaggaggataggtggagggggaagagggactccttttctcctcctgccagcgccagctggggcaaacttgagctggcaaagcgcgagaaaacttttctttggaaagtttaggtagcgcagttagtggcggaggctcagggcaagctaacagtgctggggcgggtgtggagggagtgagctgggtgcgattgggagaggggagaagggagaagggaaggagtggccagctccctaggcggttgaagatccaagtctcttcggtcaggtccgcccaaggtcccagaggcactggggggtcgggtgactgtgcggagtgtaaaagacatttccttaggaaacagacaaggcagggccaggagttccgcggttttttttccgtgcagaaatcactacccggcgacggctcagggcggtagagggcaagtcttatctgccaaggcgggattagattctctcgccgagggtcccagtatcccgccgcccagcaagggccgagcgcgcgcgcgcgccagggagctttggagcgacgcgcgtagtttcgcgtcgcacgcggtgtctggtctccgcgcaccacgtgcgctcgcggtccttggcggggacgttggtgctagcgatccgacagagcacccaggactaggtttttgtgatgccctaacctgggcatttatgctgggggcggaacgaagtcgcccaacccaagttctccctgcaccc

SEQ ID NO: 3020 - DNA, 156 bp, Homo sapiens
accgcctcctgcctcctcttcgtctcctccccctcccccgtctgacgctgcctcctcgggaagggtgtttggagggcagcggccgccccaagccggagccccgcagcgcttcttatgatcagctcggtgtgtgtctcctcctaccgcgggcgcaag

SEQ ID NO: 3021 - DNA, 210 bp, Homo sapiens
atggccccctccagacgggaaattgggaaaaatcaagagaccagtggggtgcatgccaaaccacagccagatggatggttttgcttatcacggtctctttattgcctgtggtgcaggattgtctcaccctgtggtggagggaagaggaaatgagcatcaggttgtggtgtggtttgaatgtacgtgtccctccaaaattcatgttggaac

SEQ ID NO: 3022 - DNA, 153 bp, Homo sapiens
gatgctgctgaaaaaaaacctcaccccaacagcaaaaaggtacaactgccggaaagtcccgaggccctgctccgtcggcgacttcactctccaggcctcagtttcccgatctgcccctacctccctgcgtggctgcagagttaactgagaggc

SEQ ID NO: 3023 - DNA, 139 bp, Homo sapiens
atatggcggaggaacccggcacgtagaggagttggacctaagaccgcgatcactctcacctcgcagagcccagctacgggcccgcagtctccgccgccgccaccacaccggcatgactaacggctcttcgcgcttcttc

SEQ ID NO: 3024 - DNA, 149 bp, Homo sapiens
tggaaggcggcagcgtccaggcggtccagcgcatcgagccgcgccaggcgcaccgagatgcccccgaatctgtccagctcgccctgcagatcgcacgctccaactggcggattccgcacgtaaccctgtgcgcccgaggcccagcggta

SEQ ID NO: 3025 - DNA, 86 bp, Homo sapiens
aggacctcagtgctgagcagctggccgggatgcggggttggggagttggggcggactgcgctcagatcccggctcccagagagccc

SEQ ID NO: 3026 - DNA, 243 bp, Homo sapiens
ctcttaagttgttcagtgaacgaagaacagaatcatctgttggagtagaaagaactcaaaccagtcaggaggaactcttgttatagaagaccttgggaaactgttctggggttggggaacattggttataggaagtgtatggtttctttgtgggattctttgttgttggctgaaatcatttaagcttcttgactacagtctgactcacgttaaccattccttttctgatatggacattgcttt

SEQ ID NO: 3027 - DNA, 145 bp, Homo sapiens
ccgcccagcccgagccccaggccgcccaggatggtctcggactggccgtcgctgtacatgaaggccgtgtccagttcggtgtggccgcgctccagaaaggcgcgcacggccgcggcgctggcgggcgcgtccatgcggcgcccca

SEQ ID NO: 3028 - DNA, 245 bp, Homo sapiens
gaaaatgcagacccacggggcaggaattccgagtcccggctggagcgcgatctggaatctgactcgcttgaaacagcaccgcggtggattcggagccgggtgagcagggaactgcgcctcagcccctcccacgggccgcccactgattccaggatccgaaaacgcttccagctgctccgtcaccccaggaaggcagcgccggcctctgggcggttctggtggaaacgggctccgccgcccgcagg

SEQ ID NO: 3029 - DNA, 240 bp, Homo sapiens
aaaaatagtatgaagagacatacggtgctgtgagaatccataataaagaaccctagtcagaaaagtctcaaggaagtgacgtgatcgttgtggtctagagctgaagaattaatatgaattaggtaggcaagaaagggaagtacaagagctgctttctgggtaaaagaaacaacatgggcaaagattctggggtcagagagatcacgtcagtgcacttgccagtttgccaagaacaggccg

SEQ ID NO: 3030 - DNA, 147 bp, Homo sapiens
gtctgcggacgggcgcctcctccgcgggcggagggccgcagcgggaactgggtttcggcagcgcccctttaaaccagccgcggacgcccggctgctggcgctagttccagcccggccgggcccggcctcgccggtttctctccagtc

SEQ ID NO: 3031 - DNA, 131 bp, Homo sapiens
tttactttcctactccattctgctaatatttctattaccatgtaaaagacacgagacaggtgaatataaagaaatacttatatacatccacgcacaagaatgattcaaatagataaacacagaaacacaaa

SEQ ID NO: 3032 - DNA, 436 bp, Homo sapiens
aaaaagaaatggggtcgggaagcctggaggaggggacgcggcggcgcccctgcactcacccacacctccaaaccctgcgcagggaacatccccgcgcgtccccgctgccccgcttcaagcctagcgcatggctcctccccgtgccttgaagatgccacggggctgagccaccttgcacaaaaagatttggaacccacaccttcttagaatcaaggcctggggattaaagcccctccacgattaggtcttccgccccaagggagagcaagaagacgagcggccactcggtgtccccctgagccgtatccagggccactcggggctcagccagaccgcgaggtcttggtgttcgttcctccctaacttggccgtggggcggcacagcaggcttcctggccccagcgcttccccttagggccagattggcctccgagtg

SEQ ID NO: 3033 - DNA, 109 bp, Homo sapiens
gaggctgaaccaccggcccggcgactcggcgccgggcggcggggcgggcgctcacctcgatgagcgagtagttgatctccacgtccgacttgacgaagccaccgcagcc

SEQ ID NO: 3034 - DNA, 144 bp, Homo sapiens
attcttgtcgaatccccagcttgttttctcagcccggggtgaaatgcgcagccaaaaggcccaatgagcgtcaaagcgaaagggcaggggtggtctcttctgcggatataccttggctcctcccaagtcctacgagtttaaact

SEQ ID NO: 3035 - DNA, 147 bp, Homo sapiens
gtgagaactggcacctggaaccgccgggcaggatcctccgccccctagaacctggagacagcggcggtagggtgcgggggaccgggaggcgaggagaggatggggagaaatggcgaggggaagagctggccggttcccgctactggg

SEQ ID NO: 3036 - DNA, 155 bp, Homo sapiens
cggcggcagcggcggggactgtcccggcggcaaaggcaagagcatcaactgctcaggtaggaccggtcggagccggccctaggtcttcccacccctccgttgccgcctccctcgtggtccctgcggtcggccgggctgggaaagaccccgtcgtg

SEQ ID NO: 3037 - DNA, 152 bp, Homo sapiens
ttctgggcccggctgaccctgggagggtcggggagggcggccgcaggagagtggctgcgtttcccagctagagctcggccggcccctacgcttactcagcccaccccgccccctgctcccgaggccactctgctcgagatacgccccagcgt

SEQ ID NO: 3038 - DNA, 146 bp, Homo sapiens
gcgcctcccgggatcccgggtcccctcgcccgggaagctgtccttgccgcatgatagatacttagaacccctccagccgaccccagcctccgcacactagtcagccacagttcagtgggggcatttttcttttgttaagaggccta

SEQ ID NO: 3039 - DNA, 109 bp, Homo sapiens
gcggcactagggccccgggggcagagacagggctgagccgcgaggaagctcggaggaaaagtcggaaggctacgcggaccctggggaggggctgcggagcggtcagatg

SEQ ID NO: 3040 - DNA, 136 bp, Homo sapiens
aggtcacgggaaaccgggtcccagggcagtatccccacagagggctgcgtctccgggctggggcaggcggcagcgaaagggagacgcggctccggggccaccccagtcccggcaggagttctgcccggaggtctgg

SEQ ID NO: 3041 - DNA, 140 bp, Homo sapiens
gagcggcttcagtttattggttctgtaggaagaggcgtggcgacagacacctgtgaacctcacccccgttccagacagccgactcctgtgcgcaaatcaggcgtggagaaggaagaacgcccccaaacagcggttctgtt

SEQ ID NO: 3042 - DNA, 180 bp, Homo sapiens
cgagctcaacacttatctgctaccagtcaacccctaaaaatagcccatgatgtcaccccaaggccttcccattggctcgcgtcgctctcaggggggcgggcccgcccgtcaccatggagactccaccctagaagattcttctctgggcccgcggaggctcacgggatgaggtaatgctcc

SEQ ID NO: 3043 - DNA, 144 bp, Homo sapiens
actcacagcctctctctgggatcggtggggacagagcaggctgcagcccccagctgctcggtcctgtcacgtctctcgctaccctcagggtgtgccctacactgcggcgtccgcctcagatgcagccgctggctaccctgcccg

SEQ ID NO: 3044 - DNA, 147 bp, Homo sapiens
cagcaggctgggagcccgggactgggctcccacgtgtcccgggctccgcgcagagctgagcaggtgtggagagtggtcgggtgcccagcgttgcccctccaccacgcgccggccgtttgcccccggggtccgggtccgcagtgacct

SEQ ID NO: 3045 - DNA, 140 bp, Homo sapiens
ccatcttctcctgggtgcggtgagtgtccaaaaaatgggcggggtggggattttaggcaggggagccccctccctcgcgcagccagaggcctcgggctggcgggggcgcatgcgcagagagccctcgcggcccctttata

SEQ ID NO: 3046 - DNA, 145 bp, Homo sapiens
agtgggcccaagatcactgacaggatgccgtcggggttgggctgaaggtggaaacagcacactagcttgctgtttgtggcctctttacaactgccggccccatctgagatccggaaccaacacgtgctaacctcagcccattggg

SEQ ID NO: 3047 - DNA, 253 bp, Homo sapiens
gcactggagggccgactgcagaagcagacgcagtgcacggtggacatctgccccttttgggggcctgccacggtgcttcctgaaaactcaggttaagctgactctgctgtcaggctgatgaggcgcctgcacccacctttgctcagcacgccagcccaaatggaagagcaggtgctatgacaaaaatcagttcttgtagcaactatttttgatactgaaactgaaaagcgagagcagcaaagctatccacgga

SEQ ID NO: 3048 - DNA, 247 bp, Homo sapiens
gcagtcaatcatggtctgatgccatggaacgtgccttgctctcaagtctatgtagagtcaatcaggaggcactcaacaagcaaatagtgaaatgcaaaagaaaaaaaggaagcttgagcccagtgtggctgaaacaagtacagaaagagttagctgagttaatgaagcaaatgaaaaaaaaaaaaggaaggaagaaagcaaagctcttcatagatggcgatatctcccccaagaatttcctgtgggt

SEQ ID NO: 3049 - DNA, 240 bp, Homo sapiens
caacggggacttggcacctcggtgtcagctcccgcccccacccaggctagggacccgccaacgaggggtgggggcgggaggcgcccacccgtcgcactagtgggcatttgctaaactacgttttatttttttgtaaagtgagcgcccgctgccttcgttctcccaactggagcaaactctgtggcggcgacgatggcggccgtcaggtcggtggtgatgaatagagaggatttctctgca

SEQ ID NO: 3050 - DNA, 253 bp, Homo sapiens
gtgagtgtggagtaaaagggttactagacgctaaaggaagtaaaaccaattttgtgtgtgcaactatcagctcccatctgaaatccccccagacagcttcctgctgtaaccagctttttcctgtgagtggtttgttcattggctttgcagaaatgagaacagccaatgatgtcaggagtccggatttgccgaagtcatcagcatctggcaaagcctgagctggagccagaaggaggcgccatggcctggtggg

SEQ ID NO: 3051 - DNA, 97 bp, Homo sapiens
ccgtctcaaaaaaaaattgacgaaggaccaaacccctaaaggggtgacattccagcttgactcgtatcccagagcagccctgctgtccccttgcttg

SEQ ID NO: 3052 - DNA, 137 bp, Homo sapiens
gggacgtctgcggcccgcgtcggcgctggggacaaaggtgcgtgtcgttgtcgggtccgggctctctcgttagccttgccctagttttgcacttttgaaaaagttgtgacaacaggaagacagatgccgggcgtagt

SEQ ID NO: 3053 - DNA, 148 bp, Homo sapiens
cccacgccttaccggagcaggagggggcccaggcacggtgctgcccgccgtccgcgccgcgcggggccgcgggtgccgccgccactgatcctctaaacgcggtctccccgcactctcccgggccgggggatgcagaatggtttacaga

SEQ ID NO: 3054 - DNA, 164 bp, Homo sapiens
agcaacagctgccttgcctgcctctgctttcgcagctgttttatgtaggtgacaggcggacaggagaacaattgagctttttcttctggttgaatttgcgtttcctctttcatttgtgggttattgtttgaaaagaagtgtacccacattctctgctctgtcag

SEQ ID NO: 3055 - DNA, 135 bp, Homo sapiens
gatgatttgatggttttatgagtcaactcctccaccagaagcgctgtttgggagttgaaacgaaataatgagctcgggtcacaagcttttccacgaacctttcatcctggagaaaaaggaaagtgctcagggagc

SEQ ID NO: 3056 - DNA, 146 bp, Homo sapiens
gcccttcccggctgcgaggacgcccagagaccgcgggcgctgagcgcgttgggcagactggttgcctctgggcatcgcaaactgcccccgggcgcatctggcttatctggagacctgggagcttgaggctcattggaagaggacga

SEQ ID NO: 3057 - DNA, 406 bp, Homo sapiens
gaggaatgaatctgtgtgtaccctgcaccgcgagggaagggttttccgggcacagtaactgaatacaaatgatttacacaaccacagggaaggctctggcagtccccaggagacaggccatggactcgtgaagcgtccttgtctatttactgagatcctgccatgctcagcagtcgctgcatttccacgcagtttgagggacttcctggtgaaaactaacaagaaaatatatggcatgtgtaaccacaagaccagaggggcccttcttgacctctgcttcctctcctctgacgtgggcatggcagcccgtcccctcctggggactgctgacccagtgggtggtcctggtggctgccacaaggcagggggcctttgcacggggctcagagtcccatcggccacttcc

SEQ ID NO: 3058 - DNA, 125 bp, Homo sapiens
gggggcgggggcgcggctttgtggcggcagcggaccgtggaggccgggtgcagccccgtcggctgcgcgctctctgcagaaaaggattttctacgctccccgcccatcacttggatctcgtctgg

SEQ ID NO: 3059 - DNA, 135 bp, Homo sapiens
tggggaggccgaaccggagagaagcaggaagtagcggcggccgcggggagggcggcggtggctgcagcggctggagcggggtagagaccgccgggtctcggcccgcaccaggagcggaacaagtaagcgtgcctg

SEQ ID NO: 3060 - DNA, 152 bp, Homo sapiens
agcccgggaaggggcggaggaggtgggcggccagaggcgtggagatgcgcgcaggccgggctccaggccaccggcgcccgcccacccggagcttaagatctagagagagcacggggtcccgcctttgccacctctcatcttcccggactccc

SEQ ID NO: 3061 - DNA, 152 bp, Homo sapiens
ctccatagctccgggccgggacctgggacagtggcccggatggcagcgccaggttgcaagggactaggagagccgggcgggccgggcgggggcggggggcggggccagcgccgggggcggagtcccggcctcacctggttcacctccttaaa

SEQ ID NO: 3062 - DNA, 148 bp, Homo sapiens
cttagccaaagtctctccaggcatttggggcagagtcgggactagcatagtagtatcctgactctcgcaggagggctcgctccactgtagttattaattctcctctccacacaaccaggtctaatccggccaaagtcttcaattctta

SEQ ID NO: 3063 - DNA, 141 bp, Homo sapiens
aagaggcagcggggaggcgcgagcgagacgggtccacactgtgcccacccagggctgcccggcaccccgcgcgcccacgcagtccactcttcacagtaaacgccgcggcccccgagggttagccctaagtggcgctctctt

SEQ ID NO: 3064 - DNA, 101 bp, Homo sapiens
cagccgagaaggggcagctggcgtctcggaggccgtcacgagctgtcactccgcgcccgcctgagttgccgctcaattaccaacttcaacccggggccggc

SEQ ID NO: 3065 - DNA, 141 bp, Homo sapiens
aaacgggtcagggctctgagggccgcggtgtcgccgtgccacgtccgtctgctccggcgcgggcctccttccttcccgtgcccagcccccagcgcccacagcaggcactcgcaccgggcagggaacgccgggggagccgcg

SEQ ID NO: 3066 - DNA, 144 bp, Homo sapiens
cagctcccgtacggggattcccgcaccaggcgacaggcgcctcggggcggggttctgaggaggtcgctaaggactgcaccggggcttccggcccgtctgggaagcttgcttggctgggccgggacggactcgacagggcgcgga

SEQ ID NO: 3067 - DNA, 136 bp, Homo sapiens
ccgcttccgcgcctgtccaccctgggtaacggaaccagcatcgcggtagggacatcctcgctaggcccggccggaccattcctcagggtgggccctttccgaagccgggaccgctcctgcttgtcggcatcgctcc

SEQ ID NO: 3068 - DNA, 156 bp, Homo sapiens
cccccagcgtccccagcccacacaagcttcctgtcacccttcccggggctacgccaggtggagggcagccgtggatcccagttctttaggtgtgggtgggaatagaggagcgcaagcttctgaataggggaagagaagtactgagagagcgcgcag

SEQ ID NO: 3069 - DNA, 178 bp, Homo sapiens
ctctccgtgacggcagacgggcctccgctgtcactggccctggcgttgctgtgacgacctggcctgatgtagctgcaccctgcagtccatggggctcctgtgaacccccaaggttgagacccaaatgcctctgctgcctcccaccacgccctaggggccccgcgacccgccatgcaaa

SEQ ID NO: 3070 - DNA, 278 bp, Homo sapiens
gggctgacccccagcaggcgctctgtgaaggtgtgcagagtgggcgaaggtgcatgcgcgggccgtggggcggggacaggtggaggagccagtcagacccaagtgcagcgggacgagggcgaggttaatctgagcaagaaaagcgtaaattctgcttatctacaaatgtaaacagtactgtcggccagacgcagggtccggggcgggtcggcccggactcagggtctgcttggaggcagagctagattagggcggggtcgtcctgtggcctaccattc

SEQ ID NO: 3071 - DNA, 127 bp, Homo sapiens
aggaagatgagaagcctggttggccaggaggcttatctgtcaggacagggggcggggcctggggggccgtacctttgcttaccgcgagtgggcggggcaggttttaccgccgcggcccatcagcgaa

SEQ ID NO: 3072 - DNA, 132 bp, Homo sapiens
gtgaagtccgtccgggaaacggaggaaaaaaagagttgcgggaggctgtcggctaataacggtaacgataattattgttattaccatgctaacaggttataaacattgactgaactaagcaccctgcatgcc

SEQ ID NO: 3073 - DNA, 310 bp, Homo sapiens
agcctccgtcaggaaaagcagcagaatcgacagccccagggggcgagcggggtccatggtgcagggggtcgggcggcccgctgggcaaggcgtccgagaaagcgcctggcgggaggaggtgcgcggctttctgctccaggcggcccgggtgcccgctttatgcggggcgagcgtccggccgacccccgccggggcggagcctgaggggtggctgattcatgcacggggactgtcaccccgccgcccccgcgctgcaaactgtgtaagagggagaggaattccccgccaagttgaaaagttgaacctgcct

SEQ ID NO: 3074 - DNA, 262 bp, Homo sapiens
ggagcgggtctggggaaaggagctatactcggtaaatggggaagaaaacgcttcctgggctccggcacctccttccggaggtcctggcatcccccgcattccgccccggggctccctgcaccgccgacccggacccaccacgcgacattccttccgctttccccgtctgggtcgccgccgaagctagcgggcgcctggactggctgcctcccgccggctgcagcaggacggagaaaccatgccggcgaccgggccgctctgt

SEQ ID NO: 3075 - DNA, 217 bp, Homo sapiens; identical to SEQ ID NO: 413

SEQ ID NO: 3076 - DNA, 254 bp, Homo sapiens
agccaggaccccgagggctggaccctgttccattttcagcacggattttggcgtcagtatgcgtctcctcctccatcgcgccgagcccacgtgcggctgcagttgtcacttccgcctggcagcgcgcgccgcaaacaggctgcgtaaccagtgcgcacgcgccgggctgggccatcctcctgggcgtccgcacgtggcttagcgtttaccaacaatctggctccgcccagtcccacctcctaactctggcaacg

SEQ ID NO: 3077 - DNA, 354 bp, Homo sapiens
caggaggggcggggccctgtccatcacgtgactctctcggtgctgtctccggccgttgattggcctgggcggggagggcggccgttgattggttcgggcccactcgcgcgggcgccactctctttgtctgacaagagagtcgtgaagcctccgcggtcctagaggggccgctggctgggacgcttcgctcggcgcgcgcaggtggagccagcgagaggctctgaggctgccagagtggttgtgtctgttcctccggtaaggggtgattcgccgaggggcgcggaccagacagacctcgggtcaggcccgggaaccccgagaggagagcccagcccctggtggaggcggcttggc

SEQ ID NO: 3078 - DNA, 147 bp, Homo sapiens
ggctggtgcaatcagtcagagggctttcaaagaagggctccagcgctgcgctgtaggcgtgcggcggaggcttaacgtggaagacatgggagctgtccatggtaccgtaaggcggactgggcagcccaggcgactggtaggagtagg

SEQ ID NO: 3079 - DNA, 359 bp, Homo sapiens
tagaaaccacagccactgcctatgtggaggacgccatattggaggcatggaatgcggcctgccgtaaagacagaggcgggttgttaagtatactctctactttacggcgtacccgagaacgcccccgcaggggcggtgctttggaggtgaacccgggttgggaggttcagctcctcccaccccgccgctctgggccagcaaaggtcgtcagtgacagggatcagttgtgggcggcgagtggtccctctgcacacggtatctgggccgagtctggattcattagagtccccggcgcccagcactgagtggcatgcataagtattggtgtcacgaacaacggtcagcccccggcttgcccg

SEQ ID NO: 3080 - DNA, 142 bp, Homo sapiens
cgcccgagagaaggcgccgggggaggaagccgcgcggggagaccctggcgtggcccgcgccgcccaggatgactttcctggcaagttctgcagacggtgcccctttcttgggacgatcaacgtagatgggcaaaccacacca

SEQ ID NO: 3081 - DNA, 126 bp, Homo sapiens
ctgggctctctggctttcctggcaggggagtgcttcctcttccctagttcacacctgaccggcctgctgagctttccacgggctgtgggagtgaaccctctaagttttttccagcccttcctgcag

SEQ ID NO: 3082 - DNA, 145 bp, Homo sapiens
cttcgctgaggctagtggtagccttctgggcacccctccggcttgcgcagggagcaaagggaccgcggcgccacctgcgcgcaccacgcgtgaaacgtgcggacaggacgcccccagaaagttctgccttccgcgcgcactgctc

SEQ ID NO: 3083 - DNA, 221 bp, Homo sapiens
agtctcgcgcgcctgcgacgcgggtaagggggctccaggctgcgcccacttccccgagctgccagatcccaccctctgacgcacccttctagagggagcgggctgcaagcgctggggcctgtcccttctcccctacttcgacttaccttaccagaccgactagcgctggccgctggcgccgaagcccctatgctaaaaggagacagggctgggccacgggg

SEQ ID NO: 3084 - DNA, 195 bp, Homo sapiens
ctctaagaggcggcgaggaggatcggatgggaggaggggcagggagcgcctgtggacaagtgcagaccggtcggcgcacgtcccacgccacgtggactcgcctttgtcggtggccgcctttctcgtcaggccgcgacgacagggctgtgccttatttgtgtctgtcgagagcagtgccgggcacggagttggcgc

SEQ ID NO: 3085 - DNA, 182 bp, Homo sapiens
aggtcttggagtagacactcgcagtgtttccatggatacgggaggggcggggcgggaagagagagcgcgggaaaacgtgactcctgattggccagaagtatcccgcgcctcccgacctttggccgctggcattcctgcgcgggcgggagctgcgggcgctcgggggataaggcgaggacgca

SEQ ID NO: 3086 - DNA, 144 bp, Homo sapiens
cggagatgtgggggagaggaggaagccatgcaaatgagcacggacagccagcagagacgtttaaccttggtgctgctagagtacccacaagtgctaacgaggtggctggtgttgctttaataatcaaataataaccaggcaatg

SEQ ID NO: 3087 - DNA, 199 bp, Homo sapiens
acctcaggcctgcatggggccacggagtgacccgcctgataaacagttctgggcatgaacagctgctgttcttgtggccggaactggttccttcccgtgagttcttagtctggctgacttcaagaataaagctgcagaccctcgcagtgagtgttacagttcttaaagatggtgtgtccggagtttgttccttccaatg

SEQ ID NO: 3088 - DNA, 113 bp, Homo sapiens
tcagaccctgagaagggctcaggaggcggggccagggtggggcgttgatatgtcgtagcacgtggccaggcggtgctcggactctgggaggcggagcttaggacgggccgacg

SEQ ID NO: 3089 - DNA, 144 bp, Homo sapiens
ccaggaggctcgcgctggccgaggcccgagagctgtccccgcgggacgggactagcgagggccggggagatggagcgcaggcggcgtctgggttcgaagcactttccggctgaaccacctgctgctgaggctgagccctgagag

SEQ ID NO: 3090 - DNA, 137 bp, Homo sapiens
ctctctctctctctctcgcctgtcttcatgtcgtggattgatgaacgcgaatcgcgtgtaagcgccgccaccgccgggagtctgaggaattcgcctgggctgttagaggaaagagctaagtgagagagcgcgagctc

SEQ ID NO: 3091 - DNA, 233 bp, Homo sapiens
ttcttttaacagcgcatgcgtgcagtgttgcctcgcccaaagaagactacaatctccagggaaacctggggcgtctcgcgcaaacgtccataactgaaagtagctaaggcaccccagccggaggaagtgagctctcctggtgagttgggggtcgtttcgcccaccctagtaaatataaagagctctttaatccagccagcttactagtgggggtggggatgccctgctttcag

SEQ ID NO: 3092 - DNA, 144 bp, Homo sapiens
gtagggagaggcggagggtgcagggaacatagtgttaatgttccaggttacgttcactgctgctctctgcactttctcgttccgttagatctgatcctcgtttcctgtggtgaagtagcgtgcagaatcgtaagataaattacg

SEQ ID NO: 3093 - DNA, 209 bp, Homo sapiens
actgccttatgcagtgacacagtgcggatttctaggcagtgtagccctggcttgtagagtgcgttggaggcctatgtatgagtggtggcagaaactagccgattatgcctgtagtgcaggatccgtttaatcagtggagagagaaagatgaattcgatgaattcattgcttccatggcgattacacttctaaaggtgaaatatgatcat

SEQ ID NO: 3094 - DNA, 250 bp, Homo sapiens
aactcttctagcctctgcagctttctttcctcatccactttttaaacaaacgcaggcttaaaaagcaaggaatatacccgccacactctcggctcccaaaccgctctttccctccctctgccggccacgcctcttataggcccggaagtttaccccaccctgcaccgtgattcaccggaagcgctctagggaaccctggagcttccgcgcctgcccagttttgctccgaaagacttaccgaggagggagc

SEQ ID NO: 3095 - DNA, 251 bp, Homo sapiens
acgccgcggttccaaagcgcagacccaagtgggacattcgctacattgttggcattccacgggcgtcacgtgaccccgcctcccgcgtcactctcggccgcataccagtccgggcggggcgcctgcggcccctgctcctccgcggccgctccgcccagccccgcccggccgtgcttcctgcctccggcctcgaccgccacctgcccacggcctccctgctggcctgcggtagctcgccagggcctctcgga

SEQ ID NO: 3096 - DNA, 137 bp, Homo sapiens
acgttcctgtggcttacccgacggtgccaccttctggtcacctctggcatagcacccgggcttcaagcttggcgcatgcgcggaagcgtccccgtagcccgaccccatccctaatgcttccaaattcaggtgctaag

SEQ ID NO: 3097 - DNA, 248 bp, Homo sapiens
cccaggcagagggccccagtgcacaggcccggggtgggactagcttgctgtgttggaagaccaggaagttggcaggaatacagagagcagggatggtggcagcacaaaggaagtgacagagaacggggggcggtgggggggtcttcctggctgcatttggttcctgtggtttctgtaacgcagtaccaaaaactgagtggcttaaaacatcagaaagggattctctcccggttctggagaccagaagt

SEQ ID NO: 3098 - DNA, 193 bp, Homo sapiens
gcgaggacagcaacttttccgaggaggaggacagcgagcgcagcagtgacggcgaggaggccgaggtctgtggctggggcgctgggggagacattgcgtctggggacaggactccgggcagaaaggcccctgtgggaggctcgaggggttcacagcgggctctggcttctgggaactcccagattgtctcaag

SEQ ID NO: 3099 - DNA, 317 bp, Homo sapiens
aagtgaggtactatggacactcaggagagcggggcgggggctgcagtggagtgtggttcaagctggaggttgagggaggttatgagggcggcaggcagctgtttgatggcccacgaggagagtttggggcacaggaaacaacacacttaacagcccgcctttaagtaggcatgaacttggaggaaccaacaagctgaaggtgcagcttctcgaaagagggggtcctagggaatgaagatggagaggtgcccctagttgggcagcgagctgtggagaaacaatgggagcggggcccgtgggagggtcctgcctagcac

SEQ ID NO: 3100 - DNA, 281 bp, Homo sapiens
ggcgctgttgtccccgctgtcacggcgcttgctgggcgaagccgagggctctgccatggtccctgcgtcgattttgcgctttcggtgctgctctgggacgccgaggagctgcccagcatgcgcgaccccgggcggccggatccagagaggcggtggcggcggctgctcagcgaagtcgcaaagcaggagccgcttccaaggcacgtggaacgtcaccggctcggccgcacgccgcttggccatgggcccagaggctcgggcggagcccgccaggcgcggga

SEQ ID NO: 3101 - DNA, 160 bp, Homo sapiens
gcatttagacggactccgtctcgccgccccccactccctccatggccccacgagccacctccacagcctcgcgccttcccggggtcgcaacgcctatcacaagcttctacccgggtttcagggggcccctgtagtggcgtgggcgccgcgccggtgccgg

SEQ ID NO: 3102 - DNA, 143 bp, Homo sapiens
ttgggttaaaaatcaaacgccgacccgaggcgtcagagatgggcggtcgttaggcgcagtggcggcccccggatgtttgcgatgggacggcgggctcggaacgtgtggacgtgggctttggaggtgcgagccccattgggcca

SEQ ID NO: 3103 - DNA, 150 bp, Homo sapiens
agccagggctttccaaaaccctcatatcaatactcgtcctctggatctctgtcctttggcggatcagaggctggagggtcagagctgacactgcgggcgtacacaggtgtgtgttggggtggggaaggtggaaaagtgggggctcctctt

SEQ ID NO: 3104 - DNA, 149 bp, Homo sapiens
ccggccgcgcccctcgagtcggcagttacctccttcctccggctcggcgccccgggtcgggtgatgagggccgtctcctcgcacaccacggccacgtcctccacgaagacgcagtccggaaggctctcgtcggccggcagctccaccac

SEQ ID NO: 3105 - DNA, 158 bp, Homo sapiens
cctttacatcctgccttctggtatatcatagcagacctgacataggcaagttctttatggcctagaggaagtaaggcggcgagcctagggaggaaggacacactttctgatccttctttatttggagaaattttgagtgttgctcatgttttcttagc

SEQ ID NO: 3106 - DNA, 143 bp, Homo sapiens
cacctgatgggctcgtgttctctccgtccccgatccactcgggctccggcagctgctgcttgggcgccttcggcatcgcggtggcagaactagaaacgagttacagatagaaactagaatatgctttttaaaaaaacaaaaaa

SEQ ID NO: 3107 - DNA, 177 bp, Homo sapiens; identical to SEQ ID NO: 462

SEQ ID NO: 3108 - DNA, 152 bp, Homo sapiens
cttgggctctcctgacgcgccgggcgggaccctgaggagccagctggcgcaggctatgggctgggcggcggttgagacagcggcggtatcgggaggggtaggtgagggtcgcgaggctgcgtgagcatctgagtgaacgcggtgcttttggg

SEQ ID NO: 3109 - DNA, 279 bp, Homo sapiens
gtccagcgcgctccctgccctggggaccagaggacgagcggaggaagtgtcttgggcggcaaacatcccactccccgcgccggtccgcgcagcccgcgggaacgcccctgggcttgcgggaggggctggagcgcgtccccggctccgggcggtcccgagcgcatggactctgggtggggcgggaacccgcgctctgtgagccggctgccgccgcgccccagcgctgtcatcccggggcggggcctggtccccagctgtggtcgcttcctaagcggcggg

SEQ ID NO: 3110 - DNA, 187 bp, Homo sapiens
cctcatcctggccctttattaaatatagcttaattctggacacaaacagttcccaccatgaagagagagtaggtgaccggaaaggagtgcgtcttaagcgcgttcgctgaatttgcaccacccaatccagccccgccgcccggcgccgctccttagacctggaccccggcaccctcccgccggggcc

SEQ ID NO: 3111 - DNA, 145 bp, Homo sapiens
ccctgggcgggtccgcaggcttctggggccaggaccagcgagctcccgggaaagcttcccggaaagcttacccagagagcgcggacccaggcgccgagtcttcccggagatgacgagacaccgcgagaggagcacagcgcaggct

SEQ ID NO: 3112 - DNA, 137 bp, Homo sapiens
aggacgcggagggaggcgctgcagagcacgggcgacgtgaccacagctgtcggggctaactctggaatgccgggtgctcggaggagcctccccagctggggccaagcagcgtccaagcaggtgaaaaggatgcgccc

SEQ ID NO: 3113 - DNA, 138 bp, Homo sapiens
ccgccctacccaattagatctcttcctcgcggaaggggagaagcatcccaggcacctcgcccggccttatcgcacccttccaggaagacccgatccacccacctcgcggtctcggaggcagcgctgcagccccagcaa

SEQ ID NO: 3114 - DNA, 169 bp, Homo sapiens
cccgctgtaatccacccagtgcttccctccagacccttctccctctcgtgcgcgcggaggtttcggtttcctcttttacgtaggccgccccactcgcttgaaaacaaagtccgcgatcctctagcccgcaagagagctccgggactcagaccccgggcgcgaggtccca

SEQ ID NO: 3115 - DNA, 158 bp, Homo sapiens
cagccgcacaatccgctgaccgcagctccgtaccggctggggacatggggagcctgagccagttggagatgtgggcgccgagaagtggagcaggaagcgagagattgatgtcgctggtggttgtgaaagtccgagagaggagaggcgcgcctgaagga

SEQ ID NO: 3116 - DNA, 138 bp, Homo sapiens
ccaaagttcaagcgccatcagccagccgaaggccctgagcccccagggccgcggccgggacgcagggaggtcaggacgcgacgctcgcctcacctgtttctccagcggctccttggccgacagcgccggcttggggga

SEQ ID NO: 3117 - DNA, 146 bp, Homo sapiens
ctaccctccagccagccccgggatctataacactctctccgagtgaagacacagaggtgatgagatcgggtaacccacgggcgcccgagccccagccgcgcaagctcacgattgggccagaagtgaggatgaacaagcatttagcc

SEQ ID NO: 3118 - DNA, 385 bp, Homo sapiens
cccgattggtggatgattctctccaggtgaggacctacgcgcgagggggcggggccagacgggctcacatgatttgccggcgactgtagcgccggtcccggccacaagctgtcggctcggttcggtcgcgttacagggcaggcgccggggccaaggcagggagggatcttaggagagatcgtagggtgagccacagctgcgcagccccgggtagggtctagcggggcgggatgtgggggctgcgtgcccccggatgaagtgcggggagaggtgctggtccccaggcatggcaggcagcgcggacgttctgggaccgggagccacagtctgtgtttgggttggaggatttgtgtggtcagtaaaggaatcgtgtaaggctcttgaa

SEQ ID NO: 3119 - DNA, 309 bp, Homo sapiens
gcctaattttctgtcaccttccctacgtttttaacaagacactgccatttcaaacatagcgaacacgacagattgaggaacaaggccaaggcagaggctgcgacgacctcgtacagccgctgatgccatctgttggtggctggcagaactgatgccctttgctgcgagggagctttgtttattgcacagaaagttgaaagttggcagcagagaaccttgttaccacctgggaggataggattggcaggattagggaggactggaaggggagggaatgcgtgtttgctttgtaggttgtgcatcagtaag

SEQ ID NO: 3120 - DNA, 406 bp, Homo sapiens
aaacccaggaattacatgcaaaggatgcacgtgcttctggtgaggaagtctctaggcctgggctccccctagagccgcccatcgtcctgacgtgcactcaggcggtgcggcagggctgggcggaagggaggctcatgccgcacacagggctattttcttggtgggatgaggctttgccaaggaagtcctgcttccagggacaggggtctctaaggcccagagcagagttgaggaaaaaagacctcaaatctgcaggaggacacacagggcgggtggaccccagctccagctgcggcgttggtcagggaggggtactggcagcatgagaagtgaagctgccagaagaggaacccacttttactcactctgctgggggccgcccacctgtgctttcccagggagacag

SEQ ID NO: 3121 - DNA, 203 bp, Homo sapiens
tctatctatctatctatatttttttcctcaaacattaactacgactacccaggctttttaatatcgggcttagccaaaccgctgcatttgaaagaggcaaataaaaaggtacaaagaggctgaacgggattgtcctgtccggggcccattgtcccgccgggctcggttacattgctgaggtggtggcggaacgtggccgcgca

SEQ ID NO: 3122 - DNA, 151 bp, Homo sapiens; identical to SEQ ID NO: 71

SEQ ID NO: 3123 - DNA, 248 bp, Homo sapiens
ggcagatggaacaataaatcacaggcgccgttgactgcctgcagtgcgctctccacagctgtcacttttttgtctctttggttttagctgacatggtttgaggtccactgtgaaccaatctggacttttttttacagtcatatccatcaaaacgaccagtggccatcagcccgctgcggccatcgatcgggtggcccctgcccccgtgcaggccggcgtgacccggctcctaggtgaggctggagaga

SEQ ID NO: 3124 - DNA, 873 bp, Homo sapiens
ccactcttcttcttttccgttccttttatttaagtctttttatttaataaaaaagttagctatttcacttaacgccgcttttatttcgttttcgttccaataatgctcggcgacccccggccctgcgccccacccctgcggcggtagaagccgagcggcggcgcgcagggcgcgtccacttccgcaacgttcgtctgcattcgcctcggctgcaaccccggcccgggcccccgaggaggatgcgcggtgcaggtcagttggtgccggccacccgcagcctgggtgcgcacgggatggggactggacatgggaaaggtgctccaggcccgaaggccgcgggccagcgccggggcgggctggggagtgaaaggctgggcctgggcagatgcctaggccgtccccaggtcaaatccacctggggggtgggaggcagggtggcctcgaacttcttagagctcaagtcggaactcggagccccacttcaccccgcaactcgctttccgccctctttttcccgcggagcctcagagaggacctggctctggccagtctgcgcgcgctgtgggcaggctttgcgcgcagagccgctgcaaatcctcggtctccaaacgcctggggagcaaatgcagcgcacaaccctaggggccctctccttgtcgggtttgcgtgggaccccaggtggagcgtgacgtcatgtgacgtcaccgcagcccccgcggtgtcactgggctggagtgggcggggcgcccggaactcagaactctaagcgctggtgtggtagcgtcgtggccggggtccacccagctccaccgtggctcaagagctggaagtttcagaattgcgaggtttggagcggctgaccccttccagtca

SEQ ID NO: 3125 - DNA, 144 bp, Homo sapiens
tgggccctacccagccctgcccggagctgcccgaaacagcactcaggcctctgcgggccaggatgaaaggcacgtgggccgctggggctcccagtggcagggcccgagggacagaaacattaattcaaacaacgtgtatcctgc

SEQ ID NO: 3126 - DNA, 436 bp, Homo sapiens
acctcggcccacgtgacgcgggcgcgcgcctatggaactgacggtggagttcagcgaagaaggtgccgcagagaattcgcaaacaccaaccgtaaccagagcagctgggggcgcggcggcgagagaagctgcgaagcgcatgcgcgcaggacgctgtgggaggggaaaggaggggaggagcgtggagcgatcgcctagttcccgcgttgcggggcgcatacgagacttggcgactcgctgcctcagggttgcgtgcctccggccctagcctgcgcaggcggcctgagcttggggctctgctacgccacccacgcccaccttggcggagggcggggccccacggctctcaaacttgcgcgccaaagacggagccacctggcgtactggtggaaagcgcagacttcagagccacacccgtagttaagtattcggactc

SEQ ID NO: 3127 - DNA, 264 bp, Homo sapiens
tgcccacctcctgatgaaggaggagccatgggagacttgaccaatcgactaccgcatctgcagacgtgcgcggaaatggcacgcccgtttccgtgtgaacccgaaactgccacttgctggctgaggagagccgctgcggcgttccactgtcacgtgagggggccggtcctcttcggcggcggcactcagtgagtgacgccaagtggccaatcacaggccagcctcgcaggccacgtgaggcgagagctggttccaggaaagggg

SEQ ID NO: 3128 - DNA, 182 bp, Homo sapiens
taggcctcgcccgagtagccataggccgggaaccagcggctcgccggcctttctccaccgtgctcggccccagcgcccacggctgaagagagaagctgccgactggcccccaccgagccggggtcggcgttatgatgcggcccttcagggcacgcttgtccccactttctatgcagagctac

SEQ ID NO: 3129 - DNA, 239 bp, Homo sapiens
ggccggcgaggcgaggagggccgggccgccacggtggggcgaaaagccctgaaagttcctctcagttccttccggtgcgcctcccgctcgcccttgcggaggccctgagggcggattcaaggccccgcgagaagccatctgaggcggcgacgactgttctcagccccacgggaacgccgcggacgcagcgtccctctcccggacaagaaaacagccattctagagtaggttcctcccct

SEQ ID NO: 3130 - DNA, 149 bp, Homo sapiens
ccctctggtgcgggactgccctaagcccgagcaggctgggctgtggggccgcacgtggggcgcctctgaggatgctgcggctgtggttctgctctggctgtggcgacatcgcgtggcctaatgcggaactgcaacttggtagcggacgg

SEQ ID NO: 3131 - DNA, 174 bp, Homo sapiens
cctcgttaaagtaaaagccgaccgacggctctgggaggtttgaggcctggcggggcggccccgggaagtgatttgtggccgctaggcgcgcgctggaaaccctttcccatctgcggagcccaccggagctgtgatcggaggaggaattcccccaggcagggaggaccgcagggc

SEQ ID NO: 3132 - DNA, 139 bp, Homo sapiens
gctctggggcagcgcgggtgggcgtgggcgtgcgcggcacgcaggtgtcccagcagtggggccagagtgccgagcgcgccgcagccagcgggcagatcccatcgtgtccacagctccagctcccttaggggcagagttg

SEQ ID NO: 3133 - DNA, 375 bp, Homo sapiens
aaagtaccgggattacagacgtgggccacagctcccggccatgtttaaggaggctggtgcagctggagcagatgagtgagggcagagattgtgtgggaaagatggcagcagagaggacccacatcctgcagccacaccccaggcggtggcttctgggtcttggcaggggaaataaatggcttttctgtgcatttgaggaagtgggttctggaggatggcaaaatcgcactggcacgtgaagtgcaaacagctccaggcaggaccgactggtctggcagcgggcggccaggcgagggtccccaagagtcagcctggatgtcactgctggacactggtggcaccgtgtctggcttggggtgaagttttttcacccac

SEQ ID NO: 3134 - DNA, 139 bp, Homo sapiens
gaggtgtgaggggcagggcatccagagtgtctgactggcaggctcagcacccaggtgaagcgccaggtggtctagaatgtcagcgcccttgtgactaactgcctgctgcccacttccttgctcctgcttccttttcaag

SEQ ID NO: 3135 - DNA, 1656 bp, Homo sapiens
caccgcttcacccaggagctacgggcttcgacccaaatggaagaaaggcgccttcctcacacaagcctcgtccaagaaaaaagagcagtgggaaacgatggtgggctggtggcccgggcgcacgtggcccaaggctaagacgcaagccgatcccctcggtgcacgctctgtacccccagcccgtctggatggggcgtcccccgctcgccctcgccccaagggtggcccagaactacctgctgctgcctaggcgccctcggaccaagtctcgggaagttcactccgcgctgcgctagtccggagaaactaggaacccgagtaaacccagactgtccggggaagacggatcccacccccacctgggcgccagacccatccagctgcttggagctcagagactaggtcccagccggactgcagaggcctctctggttaccccttgcaccctggcgcccccggactcggggtgggtggcggcgaggagcgtgcgcccagaaaggcaagcagtcagcgctaggggccggaggtggagagaaccctgcctcccgcctcccccgatcgccatgactccggcttcgcgaagagacctggttgccgccgggcgctcccacctgggctgcggtgcggctccgagtcccctgccctccctccccatcgcccgggcgcctgcgggcgggggcgcgcagcctggtggccactggcgcctgggggctagaagagcggctcccagcctccagcccgcacggtgccgggacagccgagtccgccgcggcccttccctagccccacgtccccaggcaggcggccaggagccagctccacggaaggcaaggtggccggcgcggcccccagcccgcggggtgggtgccccagtgtcggagccaacaggtacgggaggcgctgtctgccaaccatctgcccactctgagcaccagggcccgcgacagcccgggggtttggacaccctagagagaagcgaggaccgagggaagaagaaaagagagcgcgcgcgcgggtaagctagggagccggcggcggcactcacctcttgctgggccggggctccgcagcccggcagccgaggcgcctccgcacagcgcggggggcttcctccgaggcccgcagggagggggcggtgcggaatggatgcgccgagcgggcagcgctcagcctctcgctcacacccccagcaggcagccgcgtccccgtgccggcatcctcgctgccgccggctccctcggcgcccccgggccgctccccacgcgcgcgccgggacctgcacgagccccctcgtcgactcggagcgcgatctgggcgcgtgcctccctgtccttgtcctctgctctcgtctggggacgtgtgccccgcaccccctgcaccgcgcgctcctctacccctcccgctcccgctggccgcgcgggttcagcccatgtgcgcggctgcctcgctgcgccccggagcccagtggccgaggccccgctggagttgcgcgccctagaaactccatgcagctccggcctcctccccagctcctccccagcggatcccccagggccttgccgccgacagcaccacactcctcgctctgccggcgcccgcgttcaggagccgggcttctgggctcgccttggccgcctgcgccccagctcctccgag

SEQ ID NO: 3136 - DNA, 276 bp, Homo sapiens
gtattataagactctggcaacactgttttagactgtggggcatgggaacgttagatcccctcatcgccgttctgaagcccgtagctgttcgccatagaggagcaggccgcggcttctaagatggcgtctttttcctcgtttcagattcttcgctgctgctgccttaccgccgagaaccaccacccgccaggcgtcttgcggccacacccctggcgggttcaggcaggctacgcccacgcgacccctcccgtttccctgctttggccaatggaggag

SEQ ID NO: 3137 - DNA, 145 bp, Homo sapiens
gagaaagacggcccgggttgttcttcaggccgggcaccctgggcttggctgcgtccccatcctcttccagccaccccgtccccacacgaccccgcctgagttctggccgccttccgacccctcggggcccgccctgcgccccagc

SEQ ID NO: 3138 - DNA, 138 bp, Homo sapiens
ctcctcctcctgggaggctcagctgagcctggccagctgtggcttgggcaagctgccggctccaaggctcaggatcccactgaacttgtgtcaggcccggcctcttacccttggccccaggctcattgagaagtcctg

SEQ ID NO: 3139 - DNA, 142 bp, Homo sapiens
ggactcttcttcttgtctttcaccaggaggaactgcaccaactccgccaccgtccgattcagccggcggtaggccctgcgccttgccaaggctttggccgccaaggccctcgcgcctttccgggtgagggcgggctccgcag

SEQ ID NO: 3140 - DNA, 171 bp, Homo sapiens
gacttggtgaccttgccagctccagcagcggtgaagactgctgctgttgtaatgaggcaggcttgagtttctgtctcagttttgccacttgctatctgtactgtcagggtgttgtggttaagtttacctttggggcgcagaaaaagcatatttatggtgagagttcggtag

SEQ ID NO: 3141 - DNA, 176 bp, Homo sapiens
gcaggttgcccttgcgcaggcggcgcaacatgaggcccgggatggccaggttgatggccgtctcgatgtgcgacgactcgaagagctcgtgcggccggcagtcgagcagcagcaaggacgcgccgccgcgcgcctccagctcctcctgcagccactcggcgctcttgcagggcatg

SEQ ID NO: 3142 - DNA, 160 bp, Homo sapiens
cctcccgagcgccgccggggcgcacagcccgagtcactttttctttgcgcgtctgtcccttcctcgcctgcaggatttcgctcctggcccgtcctccccttccctgctgggcaggctcttccggagcccacccccggcggcggcggcggtagccgcggcc

SEQ ID NO: 3143 - DNA, 154 bp, Homo sapiens
gacctttccttccagggggttcagaaacttggtgccccctcgggcttctgtttcttcactggaaaaaaagtgaagtcgtcgaacaaaaccgagcccttatcgtgtgccaggttttgtgactagtgttctgtattgttacctcatggaacgctca

SEQ ID NO: 3144 - DNA, 181 bp, Homo sapiens
tacgttccccagtggcggcgggaggagtgaagttgccggagcacagcccagcgctccgcacacccctcccgcagggcggcgggttcaggtcgctgccggggccgacccaagcaacttggattccctctcatgtgttgcatctaccccagggccggcgtgctcgccgcagctcccgccgctg

SEQ ID NO: 3145 - DNA, 142 bp, Homo sapiens
cccggcgcctgcgatcccgcagaccgcgcccggccgggtgtcacttgtgggcgcacgctgccgggatgctgggccgagcccgcggtttaagacccagatctcagccaggtccctttcgccgtccgagcctctgcacctcgtg

SEQ ID NO: 3146 - DNA, 304 bp, Homo sapiens
gcctgcagaacatgctgcttggcttccgggattcagttcccttcctagggatggatctcccaccttgctgagaatcctgggggtggagtatgcaaaactcctgggtctctgtgtgtgcctgagtggctgctctgctgggactccacacagctctgtttattggacccagtaccctggtggcatgcgcttatgaggggatctcctaatctgctggttgcaaagatccgtgggaggggtgtggtttcctgggcaggactgcacaatcactcaccgcttcccttggctggggtggggggactgttgg

SEQ ID NO: 3147 - DNA, 140 bp, Homo sapiens
aggatggtgtttctgcgactggagcggcaggtgcggaccgggagccggaccgaggtttggcagaagcaacgtgtgctcgggagcaaccggcgcgggtgccactgaggcagcggagggaggcaggatcgactgacgggcga

SEQ ID NO: 3148 - DNA, 212 bp, Homo sapiens
ggactcaatgcagacacattcgtctcggtttcctacgcttctcttggccatcagctcagagaagtctaccacctgtgatacacgcctcagatttatgatcggtttccagggaccagccgaacagcctcgctgcctgcctcttcataaatcaggcactgaaagcagttcagatgcgaatttgacagaagaggcccacgtctcagagaaagcaa

SEQ ID NO: 3149 - DNA, 238 bp, Homo sapiens
aatacacaggaaacccacttcctcgatggcgtgcatcgtcaccgtgaggcattacagaggactgactgctgaaagcgctggctgtcaggtgcccaaaagataccacaatgttaacatgcagctacagctcctcaacaaagcacctattctggaactagccaagaaaatggcgtgttcttggtgctgtacaactcaccaagtcgctgctgaccaggaaagccgagaggtccaccagaac

SEQ ID NO: 3150 - DNA, 139 bp, Homo sapiens
ttctctcggtgacccgtaactgatcaaaagtccccccgcaccgcgctacgctctcgcgattcctcttagatcccaaccgtgggtccggccggtccgctagatgcgcttcccgccaaatccccctcccccagttcagccc

SEQ ID NO: 3151 - DNA, 183 bp, Homo sapiens
caagttcgcagaagtgcgggaacgcgccgtccctctgcgcaggcgcagtcggcggtcggcgtggggcgctatgccggggcggcacgtttctcgagtccgggcattgtacaagcgcgtcttgcagctgcaccgtgttctgcccccggacctcaaatccctgggcgaccagtacgtgaaagacga

SEQ ID NO: 3152 - DNA, 276 bp, Homo sapiens
gggatgaagaagaaacagatccaagccttcctgagagtaacctccccaggtttcatggatgaggaaactgaaggtcgtcctgactcaggctcatggctccgaccccggcttctgtggttggagggcagcaccttacttagactcccagcgcacgtggagcagtctgccggtcggttgtctggctgcgcgcgccacccgggcctctccagtgccccgcctggctcggcatccacccccagcccgactcacacgtgggttcccgcacgtccgccggcc

SEQ ID NO: 3153 - DNA, 519 bp, Homo sapiens
atgagctgaaaaattgtgaaagtacgtagctttactccggaagccagtataagctatgaacccacgaggaggaaaaaacaattttaatgtatattgctttaagtgcggtaagtcaccacgaagtatatgcagtctttacttccgacccggcatagaccatgagctctcgagaaaaactgaccgcatcagaaggaacaaactccagacacactctccttaactgtaacattcgtgtgacaacaacaacttccttgttgaagtcagaccaattctggacacagtggtagtgagagagaacggtatggcagtacccttcacttgctctcagttcctctttgtcctctgctcattctggttgtgcttgacaagcctttcggctcagcgctataccgtgggagctctttagctgactgaggccggaagcagccgcgttgggttgcagggaggtgcggcaggagaggcacgggcgggaacctgtactgcacgcaggtgggcgtggtgagccttgcactgagagca

SEQ ID NO: 3154 - DNA, 132 bp, Homo sapiens
tcctgataaaattacaaaccggcggccgccgcgggcagctgggaggaggtgtgcgcgctgcgcccgcgagctcccgggctcggcaaccgtggcatgcttaggattggccatatttaaaagttctgaagtaga

SEQ ID NO: 3155 - DNA, 141 bp, Homo sapiens
cttgttcggtggaaatcagccgtagccatgagtttctgccggggctagccctagagtacggagcaggcggacttttcggttccccgccccgccaggtggcggggcctactaggcctccgggcatccccggtctcaagtagg

SEQ ID NO: 3156 - DNA, 145 bp, Homo sapiens
cggtgcaaatgcgaagccgcgacgcgagctggaacctggggcggtgctctggcgcgtcgctatccaggggagctacgtcgagacggcaggccacttagcaccaatgcagacccgggagctttgaggaagccagaggcttcggaca

SEQ ID NO: 3157 - DNA, 121 bp, Homo sapiens
cccactctggagcgctgcctcacagcccaaccaagcgacacggaagagacaaccacaggaatagcagctgcggagctccatggcctccctgtgccccctggtggcgagaaggaagaaaagc

SEQ ID NO: 3158 - DNA, 147 bp, Homo sapiens
aaagccttcttctcgcagctgcaggttgccccaccgagggcatttttccgcaccgagggggcggggggcagaatgcacgccagaaaacctaagtgcgctgggtttaaaatagcaacaacaacaaaaattacaaataaccaaaaaaca

SEQ ID NO: 3159 - DNA, 141 bp, Homo sapiens
ctgctctgtcaatgacctttggccagaggttgcaggagcacacctgtgggtggaccagttgagtttattattcgaggcagcgagggagaacccacaccatggagaaccatgtggtttctcagtaggagattgttagaaaga

SEQ ID NO: 3160 - DNA, 152 bp, Homo sapiens
cgcggaagcgggttacggcctgggaagggagaggcggtgagcggcaaagcccggaacggatgaagctccggcgcctctgtccggaagaggagagccaagaacacgcgagcatgtccgaagcagaaagtcaacaactaggctggagtttcccc

SEQ ID NO: 3161 - DNA, 152 bp, Homo sapiens
ctcacccgtgcttccgcacacacgcgtgaagcacgtaagcaccgcacgatcacaggcccctctcgcgctccgaggcatgtgccggccggcatgcatcctgccagggaatctgcgtctctgtcggtgacatactccgtttcctgccacagccc

SEQ ID NO: 3162 - DNA, 153 bp, Homo sapiens
aagaaaaaggagggcctttagagcgctcggtgccggcgcccagggccgcagaaagcaggagtggagagggacgcgcgccctgcgccccccgggccctgcccctcccggccagctccggcactacccgcagagcccgcccccgctccgcgccca

SEQ ID NO: 3163 - DNA, 145 bp, Homo sapiens
ggccgcgggaagcggggggcgtcgagccgtcgggggccgagctcagcagctcttgcaggtactttatgtagcggatggcggcgcgcagcgtctccaccttgctgagtcgcttctcagccagggcgccggggaggtggccgcggag

SEQ ID NO: 3164 - DNA, 247 bp, Homo sapiens
gaagatcgcggcaaacacccaaaccctacagcctccccagaagcccagaatccgcggcccccagcgtctgtccgggagcgccgtgctgggtcgctccccagtcatctctccccgcagctgccgcgaccctggcagctagactccacagagtcgggagtcagctgacccggaccctttaaagcgcagatgtcacccttaagcccgccccggtctggaggccccgccgcgcttcccggactctaattgg

SEQ ID NO: 3165 - DNA, 252 bp, Homo sapiens
agcggcgcgtgcgcccccgctgattggctggcacaaccggcaccggagccaatgggagcacgccttgttgtcaggcgcgcagccggacggcgcggtggtcgggacagactggccgttgctgtggagacgcctggtgagttcctggaaggctggtttgaaggcggtgccggggtgggggtgaggctcagcagagcccggggcacaggccggaggggctgcaggcgcgaggctgggttacgtgaggaagctggg

SEQ ID NO: 3166 - DNA, 139 bp, Homo sapiens
aataggggctcaaacaataacaggttggacggacggatggacggatgcatgtctagatgtcgattgcccgttggctcgtgcgtctgtgtccacatgggcactgctgccctcccgtggccaacggcagtattacggtgcg

SEQ ID NO: 3167 - DNA, 145 bp, Homo sapiens
tggggcctccatctgactgcccagcgcccctcacttgcccctcgacccccacatcatctcactgctgggctgcgcccgcacccccatcttggtggcgacaccgtcctgggccctggaggaagagccgatccgggcatcctggctt

SEQ ID NO: 3168 - DNA, 146 bp, Homo sapiens
ccgagggcccggttgcaatgatgggacgcgcactttaatactgagtctttcctctgattataaaaatgctatctgttcgttaagcaacatttgaaagctgtatgaccaaataaagaagcacttttataccgccagttatcacacca

SEQ ID NO: 3169 - DNA, 138 bp, Homo sapiens
ccgagtccaggtccgcgaggcaggccccggtgcagccgcgccccggccgaaccctacatgtcctctgtactgtggacacgagtccgcggagcgccagtcacacccccgcacccctgcaagctcccgccgtagaggggg

SEQ ID NO: 3170 - DNA, 140 bp, Homo sapiens
ctctcagtttccatgtgttcaaaaccacacttgtcatctccaagctgattcatcgtgggtttctgttcctagtgatgatacataagcaccccattgccccggccagacccccaggagacctccaaggccctgagcattcc

SEQ ID NO: 3171 - DNA, 126 bp, Homo sapiens
gtgggtacttatccccagtcagtcatcagagagcccttcaggagacgtcactcatttctgtctcataatgaaactgaaagttgagacctctacggaataaaataggaaggacagaaaacttctggt

SEQ ID NO: 3172 - DNA, 135 bp, Homo sapiens
gttcgggcgctctgcgcatgcgcgggtctgggggctttggggagatacgtgcgacctgttaggccgctctgcgcacgcgcggggctcaggcctgagctgctatgggggcagtgggggaaaatgggagacgctccg

SEQ ID NO: 3173 - DNA, 181 bp, Homo sapiens
cggcggacgccgtcatgaacgcggcggtggtgaggcggacgcaggaggcgctggggaaagtgattcggaggccgccgctgaccgagaagctgctgagcaagcccccgttccgctacctgcacgacatcatcacggaggtgggcgccggggaccgggcccggccaggtgcgggtcgggattc

SEQ ID NO: 3174 - DNA, 149 bp, Homo sapiens
tttgtcgccatagtttgcgaatctgggtaaacctggatgagagagacgccttacaattgcaaacatttctcaggaggccgcctgaaaacgcccaaaccatagagctcagttcctagctaggcctctaccagccacttccgctcgtccgc

SEQ ID NO: 3175 - DNA, 144 bp, Homo sapiens
cgtgtttcggcttgggcgcctaccggtagtcgccggccgcccacgacaagctgtagggccacgcggggcgggagggccggccgtggaccagctgcaagtctgcgttctgcagaatcagaggctctgaggaccgccccaagggcg

SEQ ID NO: 3176 - DNA, 201 bp, Homo sapiens
agggagcggggggcggagtccagctcccaggccccacctgctggccgcccctggctcccgcccccagggacgcgcccgggcctccacccgcgcctgcacaggctgccccagacctgaagctcccggagagggcgcgctgccagtcccagcccttaggtcggcagcttcctccgttaggggaattccatctcttgctcttgg

SEQ ID NO: 3177 - DNA, 281 bp, Homo sapiens
tgggcggccgcgggggcgctcgccgcgctcccgggaggacgccggaggtgagcccgctgtcactgggcgccggggcggccgcctcccttcggctctgtcatttcatgtgtgaccgcagttctgcgggctcccctcctcagctgaccgacctcagcgccgtggtacctaccgaggggaactattttggggagtctgtgcccacggcgcagcggggagggagggcgcactgccgcctggcgaggctttgtgttgccaaagcgagagcagggtaatcaaacaga

SEQ ID NO: 3178 - DNA, 209 bp, Homo sapiens
gtgacagctgagttggtgttccccttcattcgtttagttcagcgcgttgaagcgctcactgtgtcctaggcagacaccgtgctgtgcgcggggatcacagttatctagttcctctcgcgaggactccgagggacaggcagggtgctgcggagcgcacaggaaaggacctgaccctgtcgcagggaaggaaggtgatgcttaagctgagc

SEQ ID NO: 3179 - DNA, 172 bp, Homo sapiens
tcgtggcgggaggaggcagggcagggcctctgggacggggctggacggcttgttgacggaaacgagcccttgacgctgtggcccggaagtggagcggctgtcgcagtgcggctccggcagtggcagcggaggcctgtgtttgcggccttcggcaagcgactgagatggcgag

SEQ ID NO: 3180 - DNA, 515 bp, Homo sapiens
ttccttccactttcactggtgctgggggcggcgcactctttacgacatataagcggaaaattctgcaaaagtggcccccggggatccccgcccgacccctgtctgtcgctaatgtgggcctgtctccggaaattcgaggttgggcctttgcctgaatctgttgctattgctccccttgctaccgctgacacttggcaccgccgcctcctagcagcggccagacgcggggctgggggccttccacgcaaaccgaaggagatacggacatcgtcattctccccaccgcgcgagccgggcccgccacccacgcaggggagaccgtgcccgtgcccctctcccgcgcctgccgcaggtgagaccctcgctccccacggagttctgtttgggtttccgtggcgtttgttccccgcaggtttgtttatttttcttcaaattacagatgcagggaaaaccgcctgacatcatgagagcgggacaaacgctcactttgaaggattcctgggcaggacttcaag

SEQ ID NO: 3181 - DNA, 144 bp, Homo sapiens
ccgggacgccgtccggagactcctgtggcgtgggtctgaggcgcggtggtccggtgcggtccctgggctggtggagagcgggagggcccgggcgtccacaatcccgagctgacctcgcccttggtcgtccagggttggagccca

SEQ ID NO: 3182 - DNA, 98 bp, Homo sapiens
ccccgcgcttaaagtgtttccacgttacaggcgacttaaaggcagccctggagcctgacgtataattcgagcgccgatgcagaaaggagtcaggtgtt

SEQ ID NO: 3183 - DNA, 136 bp, Homo sapiens
gggggaaaatctgtgaggttaccattgtgtttatccccctcggttggcaacatgaaatgccaactcatgatttaaataaaccactggcaacgaagggcctggctggctgcaagtcagttctccaaatcagttctat

SEQ ID NO: 3184 - DNA, 157 bp, Homo sapiens
atggagtgggcgggcgagggtgtgagagaatgaatgatgtcaagagcgcgctgggcgcagggcgcagggagcgggccgcgcgcggcgggcggggagagcgggcgcggggccgcggtcaacactgagcgccgcgccgtgggccgagtggggcggggag

SEQ ID NO: 3185 - DNA, 148 bp, Homo sapiens
tgagttttaaccactcctcacctcccaggctcgcggttggacgggcggaagccctgtgagtccagatcgctttgtgtcgggggtggggaaatgggagtgggagtgggggtggagggggaatgcggggggacccagcttaagaactgca

SEQ ID NO: 3186 - DNA, 148 bp, Homo sapiens
caaaccaaagcccagcggccggccactgaaaatgggggcaggggccgctgcggagcgatgaatcctttcctcagccgcgctcgggctgccggttcggcggccacaggcctggcaggcgcgttagagacctagacccgttcccaagtaa

SEQ ID NO: 3187 - DNA, 314 bp, Homo sapiens
aatacactacagctatatgtccctgtcttcgacaagcagcattaaaaggggagctcttagactgcccagtaatgcaagatcagcaaggcaatcaggtacacgaagggttaagaaaaggcattaggggcaggagcaagtgcaggaagctcccctctgccggcagcagctgctgagcagtgtggggagggagctggcacagaggaaacgcggtggcgaaaagtggcttctaagcaagcacaaagccgcagccgccctgggacccacctgctccgctctctggctccgcaggcggcccaaagcaaaatttgttatgt

SEQ ID NO: 3188 - DNA, 138 bp, Homo sapiens; identical to SEQ ID NO: 154

SEQ ID NO: 3189 - DNA, 135 bp, Homo sapiens
agcaggttatggcagacagattcatttaacagatgagagagaggtgacaggaaggttcgcaggcttgacttcctaacagctgctctctgtttaaagatcgttgctctagacatgaagtccttgcccatgcctatg

SEQ ID NO: 3190 - DNA, 455 bp, Homo sapiens
ccctcagcacagaggagaggtgacgaatgccacttggtctctgcagcgtctgtagagggaagtctgtaagcgggagtgtcaaccccaattggcagattctctgacacttcaagtctgcaaaggaaaagcaggtaaccgacgttgtgtaagaagtgagcctcttggtttgggtgggggcacagctctacttttatggtaagagtagccctgactacggaagtgggctgaagggtgctgtcccaagaaaagcggaagtatctgttgagtcttgtttcctgtcacatcctggagctgaaggtagtcacatttcaaatttaaaaaaaagaaagtcatgtgaagttaaccagtgagattatcttttacaggcaggataattagaatcctcagtggtgtagaatcttccacctacaggcgggttgagttttatcacagacgagaggggccatggaccctca

SEQ ID NO: 3191 - DNA, 161 bp, Homo sapiens
ccagtgggagagtgagacccaatgcaagcattccagttctagggacgaaaatggaaatgcttccttcctctgtctcagctgacaagctggaaggaagtggtctgtacgtgaatgttacaaatgagatgggtgactaagctaaaagcctgagcagttcacac

SEQ ID NO: 3192 - DNA, 112 bp, Homo sapiens
cctccagcagctctgcctgccttggtgaggtccgtcagtaacagtcgcccagtccagaagacttcgccccaggcctacccccagggcgtcggtgcgagtatggctcgcttcc

SEQ ID NO: 3193 - DNA, 144 bp, Homo sapiens
aaacgcggctatcgcgagaactgtcgtcactgcccggccttccagagacgcccttgtcgccatgtttgttgtgggcaggcgcctgaggctgacggctggcaagcagggcaccgcggtgcgctgaagctagagattccgaaaggg

SEQ ID NO: 3194 - DNA, 243 bp, Homo sapiens
atgacaaatcctgggggcccccacatcgggtcttcatggatccaggccccaaaaggcatggtttccacatcagtggggcactgtaaggctcagagcatttcctgggcaaacctaagcaatgtgatgcattctcctacctaactccctctgtgacctccagcaagtggcctctcctttcagacctacatttcacatttcacctccgcggtgaaatggggtgatagacaggaaggggtggaggca

SEQ ID NO: 3195 - DNA, 184 bp, Homo sapiens
attgtgctgaaatggaactacataccgggtgttcaccaacaagcctgtctaactgcctagcaacccacttcctgaaactcttgctgggtccagagtctaagtgtttcagaagccacagatgagaaacaggaagggagcctcacccaggcagactacccaggaaacaacgaaggtgctggaggag

SEQ ID NO: 3196 - DNA, 276 bp, Homo sapiens
tatgggctgagtgaaaaaacctcgcccgcattggtttctgatggaacagctggcagcgccacggccccgggtggggtggcctagaggcaggggtgcttgggaggaacatctagcacccgaccacctccaccaggtgggaaagggacgtttgcaccaaatctccgccggcaaagcagaggctttggggaattacagaaaaactataatgatctaaaagagaacaagttatcttgaactgtgcgggtatttgaatcatacagaaaattgtcctgtgtg

SEQ ID NO: 3197 - DNA, 141 bp, Homo sapiens
gctctgcagagctggttctatacttctaggaaaatagccactgccctagagctgctgattcctccgagagtgtgccacagcgctgtgctggaaatgccacaactcatgggaggctggatctagcaatgccgtcaaagacag

SEQ ID NO: 3198 - DNA, 247 bp, Homo sapiens
caccagccactccgcagggccgccgccgccatgttggagaatcgtgtgaccttctcgcggcgcggcccggttgcgtcatccgccgcttcggcctagagccgcgcaagcctgagaaaagccgctccaggagcggggtttcgggtagggagagccctccgattgggtccgtcatagggcggggcattaaaagggtagggaatgcctagagagcttgacctctgatagggcagtgttttggaaggacggg

SEQ ID NO: 3199 - DNA, 179 bp, Homo sapiens
cgtggccagggtcagaaagtgcagaaggttatggtgcagcccatcgtatcctacgcaggatgtcaggactaggaggttcgggtcagaatacggggtgcgaaggcgcaggctgagggcaggcctgggatagtggagtacggatccacatcccatgagcccccggggctaccaagactgga

SEQ ID NO: 3200 - DNA, 144 bp, Homo sapiens
caggagccggcgacaaacttgaagccgtcctcctaacaataggaaagagcactcccattttcctggctcaaacttgcgggaccccgcgaggctggatcctcccagccgccctctcggaacccgctttacctttctccctgtttg

SEQ ID NO: 3201 - DNA, 159 bp, Homo sapiens
tctagtagaatttgagaaattgctgactgaaggttaacatttgaaaggatggttaaccgacctgtctgcagcttctctgatctgtggcttcctcttccgttcactccagaacacactgccatctggctgccttgctgaagtggctctccttcaaagata

SEQ ID NO: 3202 - DNA, 151 bp, Homo sapiens
agctcatctcattcttcggggagggagacctggtgcgctacctctcggagaagcttttcaccagcagccacacgatgagcggcaggttctcgcgctcgttgtaggtaggtaaaagcaccgaatatttgttctgtcgtggactgcgcacttc

SEQ ID NO: 3203 - DNA, 256 bp, Homo sapiens
cggaagcaaccctgttccaaatgcagcgcgctttacggcggcgcgtccttttaccgcggtgtggccggctcgcttgtcgctcgcacttttgccctattggctctgcggctccgctcgccgcactttacggcagtgtggctggagccgcggctgacgggcccgcggtctgggcgtgagtgcagggaagtggagtatttgctgggccgggtaccatggacgtgggcgaacttctgagctaccaggtatgaggggcagg

SEQ ID NO: 3204 - DNA, 136 bp, Homo sapiens
ggggcccgggccgcgtggaggccgcgcgatcctctccgcgcgcgctctcgccggggtcgccggacaaagctcgcccccctcgcccggcacccctacagtcgccctcccaattacagcggctgcaacaataggcagg

SEQ ID NO: 3205 - DNA, 190 bp, Homo sapiens
ggcaccgaggtgcgactcgctgagtctcaggctcaagctttaatctctgcgaagttgggcggctccacgggctcgcccccgcccccccccgccccccaatatataaaggcatatccatagttctggtatctaccagagggggcaaatccccccaagcggctttcaacattccgcttcctacagtcggtgc

SEQ ID NO: 3206 - DNA, 184 bp, Homo sapiens
gctcttctaaagccgtccgctccagccctggtggtgctcgttcccggcgctcgctcgagggggggctgttggaacttggcggggctggaccagcccggccgtgggaggtgcgggccgcggcggctgcagcggcggggtggctgcgctgagcaaacagcggccccttccggccgcaccgccgcgc

SEQ ID NO: 3207 - DNA, 149 bp, Homo sapiens
caggcccggaccggcagccggcgtccagagaacggccgcgtcaaggtctcgtagtccaccgcgtagagctgggagtcgcgcggcctgttcagttgctcccgcagggcgcgcacgcggcgggccagctccgcgatcagccgcggacgcac

SEQ ID NO: 3208 - DNA, 387 bp, Homo sapiens
ggacggaagggaggaccccgagccgcgtgaaacgcaaggccctcgtgtgtgcgcagctgacaccctaggcggggctgcgtcgggggcggggacaggcgcgtcccagcccacgcagccggaacgcctgagcgctgggcgcctggtctgccggacctcagcagggggcaccgcgggccggactgtggaggggcgcacgcccggaagcggcgagggtagccatgacggcctccgtgctgcgaagtatctcgctagccctgcgcccgactagcgggtgagtgcggacgctggccggatagcggagtgcccagggcgcgtgcggggtcttcgcgactgtccgccaggactcgcctgtgctccctgctcgcctcccagtccacgaatatctca

SEQ ID NO: 3209 - DNA, 143 bp, Homo sapiens
cgcttcctcccagaggcgctccgtggcgtcccgagccagctgtttcctgcgggagagcgtgcccggggcgggagggcgctggccgccgcctcgttggcctcccggtgcctgcgctggtgcccggctccccgcggagcggcgcg

SEQ ID NO: 3210 - DNA, 163 bp, Homo sapiens
gggaggtgaaggcccgcgccccgccccccgcgcctgtgggagggagctgggggcccgcaggtgcacccagccgtccgcgggccgtctccgggttgggtaccggtataatccgcttctagcttgtttggaggcgtgggctcttgggagcgggacttctgctcaa

SEQ ID NO: 3211 - DNA, 267 bp, Homo sapiens
ccccaagccaatttcccctgggcgcccgccccgtcctccggtcactgcagcaccgtctcagagctcaccgtccaagtcctcgtctggagccgccgccacccggtgctgcacttccccctgtaccagagggtcgaataattccgttaccatgtccttcatctgggccacgccagacaacaggccctggaaagggtcgccgtcacccggcgcctcacaggacacccgcagcttctgcggcttcccttcctgcccgacgtactctcccag

SEQ ID NO: 3212 - DNA, 147 bp, Homo sapiens
aaaatcttcaaacaaatcccagcccaggaggaggctacacgatcatgtccgcgggctgccggccggaggggcgaggacgcgcgggcggaggcgcggctgccgtgctcaggcagggagccgagctccgggtgctcgccgcgcgcctcc

SEQ ID NO: 3213 - DNA, 243 bp, Homo sapiens
gccctggaaatgaggcatgtgcgcgcctcctccgtgcacccagggccaggcgttgaagacggaaggggcgattcctgcgggtgttcttctcggagctgaggttggcacgcaccagtttgtccaccggggggcactacggagccgagctaggagagcgcgcgggctcccggagcctcccagccctgattgatccgcacttgagcccggcgggaaaacaggtgtcccgagaggagaggaactagc

SEQ ID NO: 3214 - DNA, 252 bp, Homo sapiens
tgcacagtggttttgtttttaggtgcatctacctcatcacatggctaccggccacacagcaactaacagcaccgaggaaacacaacagcctgtttaccttcagccccgccactaacccttggccaaagggaaaggggcaggacatcctcccgctctgagccacctccggaagtgacgtcggagtgtcaacatgcaagatggcggcccatcaccggcagaacacagcagggcggaggaaagtgcaggtatgga

SEQ ID NO: 3215 - DNA, 135 bp, Homo sapiens
gctgtctgtgcagatttccacctccctacacaacccccttctttcctcttgcagagaaaacaaaaacggtgtctctcgagattgcttttgcaccgtttaacagggttatttaaagccattgcttttctgctgtct

SEQ ID NO: 3216 - DNA, 134 bp, Homo sapiens
gttccatttttcgccagggttccaataacacggcatcataaaggcaacgcaacccacagttctcaagacatttaccacggtcactacatccggcagcggggtggcccctagctcctgctgcccccccgcccttt

SEQ ID NO: 3217 - DNA, 241 bp, Homo sapiens
ctgaccagtggagcgcgaatcccacggacccggatgcagataaaggcgcaggaaggaaccgcggcgtggctggcgggcgctgcgcatgcgcaccgcctttaggacgcctgaggtgagacgcgaggagttcggtccgagtgcggtgcggctgggcgctcttcttgcctggaagatcgcagtttctgggtcatcactttacgctactttcccctcccccccatctttcaaagagggatttgca

SEQ ID NO: 3218 - DNA, 340 bp, Homo sapiens; identical to SEQ ID NO: 515

SEQ ID NO: 3219 - DNA, 178 bp, Homo sapiens
ggtccccgccgccagggggcgcccggccccggtagccgacgagacagtagaggtaatagaggccgtcctgcgggagcgccagcccctcggcgtccgagaactgcgtcccgctcgtcagaaacgcctgttccttcgtcgtctcccagcctagcccctgccccttcagcggagcgcctgc

SEQ ID NO: 3220 - DNA, 134 bp, Homo sapiens
cagaggaggcagcggcccgtcccagatggtcgccaaggaccagggggcgattgagcggcagcgggcgtcccgctggcctcgggctgggctgtggttcggtccagagccgaccggcccatagtcaggtcggccac

SEQ ID NO: 3221 - DNA, 108 bp, Homo sapiens
ctttgcagcttctcaaacgcacaccccagtgccctttctcgccacaggtgtgaaactacatctcccgacaggcggcgttgtccccttccttccttccttcctctccca

SEQ ID NO: 3222 - DNA, 164 bp, Homo sapiens
gatggctgtattgccaacagggcattgacggggaagactagggggctagggccctgcgtggggagtctgggggctctaaaagggggctgggcctgagtggggagctggtgatcagcggttttatttctcgggttgctagctttggcatcagactttgaacccca

SEQ ID NO: 3223 - DNA, 273 bp, Homo sapiens
tttgctcttggctacaaactgcaccgccctgggaggggagggtagtgggaggggagggatgggagggggcgtcttagagcaatcggttaccacagggcgggtctgagatgaggaactttcacggttttctctctagcctttagctggtctttccttcagagttaagagaagcccaaacaggagactgatgaggccatccgccccaactcgtctttctcataagtttagttttgagagaaagtaagaaacggaggccggggctgggcgccgtgg

SEQ ID NO: 3224 - DNA, 146 bp, Homo sapiens
caacccgggcaagggcaactactggacgctggacccggagtcggccgacatgttcgacaacggcagcttcctgcggcgtcgcaagcgcttcaagcggcagcccctgccgccgccgcacccacacccgcaccctcacccggagctgc

SEQ ID NO: 3225 - DNA, 147 bp, Homo sapiens
tctaccaggagtgtgaagacacagagacttattgcgctggcgaagatggctgaggcgaaggcgtgtccgacttgtcctcggagttctgagggtttcagtgaccccagaaggctgagaagtggaatccgaactcgaggctgcccgaag

SEQ ID NO: 3226 - DNA, 135 bp, Homo sapiens
tgtttctgtagaaaacgtgttttgtgctcacgaggcacacgagggagggctttgggcacacagcccattcatacgctggacactgcatgtttatttttgtgaaaagaatacctccttattgctagacacctgcaa

SEQ ID NO: 3227 - DNA, 146 bp, Homo sapiens
ttttgattggaacagaccctaagactaagagcctggaaagaaaaaggcaaatcacccaataaacgcctgtcttcgcgactctctaacccggtcgtatcgcgagggatccggatattgaaagcccctttgccggaagactcgggcgc

SEQ ID NO: 3228 - DNA, 117 bp, Homo sapiens
gtgaccgaggacggagggcggcgcggacggcgccgtgttcgcagtgctcgaaatccccacgaccggcctcggacggcgaccccggccggcccagctcccactccaagcggggtgacg

SEQ ID NO: 3229 - DNA, 148 bp, Homo sapiens
tggaggagctggaacagcgcgaggtgctggtgctggggctggatggcgcaggcaagagcacgttcctgcgcgtgttgtcggggaagccaccgctggaaggccacatccccacctggggcttcaactccgtgcgtctgcccaccaagga

SEQ ID NO: 3230 - DNA, 245 bp, Homo sapiens
gataaggaaactgagacaccacgatgttgggtaacttggcagtatcacagctctaagtagtggcactaatacaaaaatcatgctaatcttgtgccagaaccgtttctttctatcacatttcactgtatgtgctatactgcctttcatagaaaagttatgaaatagaaatgctttatgaaggaaggagatgtgagttggtgggaattacacgtaaataacacttgtaggtagtcttagataaaggg

SEQ ID NO: 3231 - DNA, 142 bp, Homo sapiens
ggaagccgcgctggcccggcagctctacccaggagccggggtccccgcccagcctggcttcctgtccagcagagggcggcaggcctctctggcccgctccgtccggaggccctgcacccagtggccagcagagggcagcgca

SEQ ID NO: 3232 - DNA, 455 bp, Homo sapiens
cctaactcaggtgctgccaggacgttaagagttgcatgcttggcacagcgccagaaacgtggcgagtacttggtggtcgtcagctgccactgctgccatgacaggtagacagcatggtagtcagaagccgggcatcccttgctccacccctgactctcctgcctgcacaagatgcagccctctcctctcggagcccttcttagaggaagcttgcggggtggtgtgtgtttctctcactgagtctgaagccgacctcaaccccagcctgagccaaatgtcaccggaaaggcatggcctgtggtttgctgacgcccccgcctcaccagccctggaagcctgctgtgctcttggggccccaaaggcagagggcctggctgggccagctcatgaggttggaggctctagaaaccaggcggaagggacgagggtggcaaccagattgggtcctcagtgag

SEQ ID NO: 3233 - DNA, 175 bp, Homo sapiens
tcctagggggcaacaggggacggaggccagcgtaagcaggagttcgcgagcgggtcagggatcgggtttcgtaccggctgcacccgaagatgccctccacaccagctgcaccacgcccaatacctgggagcacacagtggccaccaagtggaagacattattctccgccgctctc

SEQ ID NO: 3234 - DNA, 427 bp, Homo sapiens
aggacacgacgcccgccccgtcgcagcgggcagagccctcagtggggctggaaacgcagcgcagcgccgggtcccggtgcgtccccgaatccacccacccaggggtcccccatccgtgtccccgcaagctggcaatttacctgaagccgcagccccagccgcgcccgcacccgagcccgccccctcgaagtccggggactgattatcaaggccttcgccctaactgacggccacgccagccaaccagcacccgaggctctccaagccgcccagtgggacggtggggtgggacaggcaggcggggcctggaatgtaggggtggtgactgagggcgggccctggagtgacggtcgccgagcgctggctggcggcatttctgcaccagcagaggtcaagtctctgcccagcgccgggccaaggagcttgg

SEQ ID NO: 3235 - DNA, 156 bp, Homo sapiens
cgccacagtcctctttccttgcctcggtttccctggccagggctccaaaacagggaaggagggtgggagagcgtgaggcggataaacgcaggggtaagtctcaccccggcctgaggcctccaagcgtcgtccttggctggccccggggcagagcag

SEQ ID NO: 3236 - DNA, 174 bp, Homo sapiens
ccctcggcccagggcccgtggctgttctctccaagggaccatctcgcccctcagccaagtcgcccggaaaacgagcgctcgaccgcctctgccccgctctcgctctgcacacagcaacggtctggtcgctcagccacttcctccttccagcctcatctggttcccaggccgctg

SEQ ID NO: 3237 - DNA, 204 bp, Homo sapiens
ctcttagcctggctcagctgcagaagccgagccccagggaaggttgtggtttggggcaccccgtggcattgtgtgcacagggccaatgaggcgcaggactggggatggggggtggccatgtgtggcatcgttggtttctgtggcaggaaccagagttgtggcacccagggctgcagactccggttcctctctgctgagccccct

SEQ ID NO: 3238 - DNA, 147 bp, Homo sapiens
gagacacgcgaggctttagccgcgacgtcggcccccaggggtggccctgtcgcccccagcgcccgtccccggccagccccgcacctgcagcagctcctgcgcgttggccacggcgatctgcactttcacctgctccattatgagccc

SEQ ID NO: 3239 - DNA, 140 bp, Homo sapiens
gaaaagtgtgccgaggtgtgtgaactggcatgacagcctaagtaagacgcggaatgtgggtgccctggaggtcccgcaaggctcttcagctctcagtttcgggagctcaagccgcaccgctgctttcacagctcatcggg

SEQ ID NO: 3240 - DNA, 158 bp, Homo sapiens
ggcgaaccccgagcgcgccgcaggagtggccggcacccccatagactggggaaggaaatggaccagagggcaccgccggctcccacccagacccggcctccaggcccgcaccaccccagtccacccggagctggacagcccactgcgggccggggtgg

SEQ ID NO: 3241 - DNA, 157 bp, Homo sapiens
gactgcgtcgcagccgcccagtccatcccactttcaatcttacaggcccctgctgttgctgccgctgccgccgctcccagctgcccagtctggcgggctcagtcccgcgttgccatgtgtgggagaccgcgtcgcgtaagcgctggatgtggcttcg

SEQ ID NO: 3242 - DNA, 140 bp, Homo sapiens
gagaaggcccagcctagcgggaggtcaggaaagggtggggtgagggtgcactggccggctgtctgaggagtgcaggaagtggatgctgactgtaaccaggaagacacacaacgatgccactgggtgaccaggaaggagag

SEQ ID NO: 3243 - DNA, 143 bp, Homo sapiens
tcttcctcctcatcctcttccttctcggggaaggcgacggtatcttcgatgaagctcaggtccgccatgggaaggccgcggggcccctcggcgctctcggcagcagtgcctgcgccttcgctgggcgcggggctggagccgga

SEQ ID NO: 3244 - DNA, 194 bp, Homo sapiens
ccgccggggccggctcttaaagggaacggcgggcagacgcgggctgggggggttgtcgcctctgccggcgcaaaccttacaaccttctccgtggggccggagttcagcgcgccgcaagatgctgggacacaaaggtggtaggcgaggatgcaatacaaatgatcagagctactccggattcagaaattgtgggg

SEQ ID NO: 3245 - DNA, 139 bp, Homo sapiens; identical to SEQ ID NO: 59

SEQ ID NO: 3246 - DNA, 137 bp, Homo sapiens
ggcaccataagactccctacaggtgggctacacttaggggttcaaatgctgcattaccgcgctcgggtgagcgactgcccggcctgcaactcaagggactcccaggccaagtggctccgaactcgcgagctgtcgga

SEQ ID NO: 3247 - DNA, 319 bp, Homo sapiens; identical to SEQ ID NO: 57

SEQ ID NO: 3248 - DNA, 152 bp, Homo sapiens
cgctctgcgaacccccaggtctgcgatctgttccgccccgcgcctcccgccgccgcgtttgaacccgaggaacggcgcgggcgggtctcagccgtgtttggaccaatcagcgtctccgctcctatgatagacatgggcgtctcagccaggcc

SEQ ID NO: 3249 - DNA, 176 bp, Homo sapiens
gcgagggtgctgcgggagcccgccttcctcgcgggcagcggcgcagcctgcggggcgctgcttctcgggctctgcgccgccctctactggcgccggaaacagcgcaaagagctcagccactacacgggtgagctcccggcctcggagcggacggatccgggagggagccaggcggc

SEQ ID NO: 3250 - DNA, 274 bp, Homo sapiens
agtctattccattccactcaacgtctgtgctgggggcttggcactgggggtgacatgcacagagacaaagaatagcccatgttttatggtttagctgcagggtgcagtgaacaagggagccaccatacccagtgaaaccgcagacgaacttcctctaagtggggaatgtcacagaatcacagatgtcagcattagaaagtgctaaagttgaagaggggagctggggccgggggggaggaataaaacaaaaaaaagaaagcgctaaagttcttat

SEQ ID NO: 3251 - DNA, 161 bp, Homo sapiens
gtcacttctcgggtggttttgtttctcctctgcttccacagttgcaaaccctcgaagtgccacgacccctggggaaactcgatcttaagtcccatggccaaacgctccagcccgcggggctctcaggacaccacagcgatcggatttcgcgtggccgccag

SEQ ID NO: 3252 - DNA, 144 bp, Homo sapiens
cccttctctccctttttagcatttattgccttctttttgtcctttccaacttggagagggtccgggtgtggagcgcgcgtggatcggacgccttggtctgcgcggccctattcattcgctccccgggcagccgcgtcgcggaga

SEQ ID NO: 3253 - DNA, 153 bp, Homo sapiens
ttctctaaatgcgatttaagggactcaggaaggagtgaacaggtgggtgcgagcctgggcttgtggggtgccccccacaggaaaaaggaagtggccgtctttgtcaggcatgtgggtgagcggttacgacgtcatggaatgctgaagatctag

SEQ ID NO: 3254 - DNA, 141 bp, Homo sapiens
cccgcccgggcgtcctgcgtcggaggagggtctctgggtcgggcaggggccacctcttggcccgccccttgtcgctggacgtccgaagattgggccatttcccttgccgcgcccttaccgcatatcggggtgcgcccggcc

SEQ ID NO: 3255 - DNA, 409 bp, Homo sapiens
atgttagatgcttcccatggcatactcggtgaacacagccatgtcctaaaagcaatctaccaaatgctgagagagagaggcacttacgcggcatgatcccttggctcaccagttcttcccgggtccggcgctgctggagtttcaactgtagcactgcagggcagcagagagagaggagagatgaggggtcagttgggtattccacctcaaaaaacacattttcaaacgcaaaaaaagtctaaaaacagaaggatgtagtgtgaaagaagggtccccttgaagtgcaactgtctgtaattgcagaagtggcctgatacagcagagtttccgtattctgctgtgggcggtgagaggaagttgcgaagggtcttgcagggcgataacaatccacaaagcatcagagtcttgc

SEQ ID NO: 3256 - DNA, 211 bp, Homo sapiens
gattttaaagcctctgatccagcaagaagagtttaaagcaattgctgagttttatagcactcgtgacgtcaggtccaaatgagaaattgactggcactccgggccaatgggaggcggcgagagcggccgcgattagcataatagtatagaaacaaggaaacttttcggagctgtcaatcagggcccaatcagctgactgtcagctgggacg

SEQ ID NO: 3257 - DNA, 240 bp, Homo sapiens
aaaatcccaaagaatttcgcaacattgcgattgcactggcttgagaacgaaggaagttagtcccttgcggtgatccgtcctttcatcctggcgtttgcctgcagcaagatggcggcggtgtcaatgtcagtggtactgaggcagacgttgtggcggagaagggcagtggctgtagctgccctttccgtttccagggttccgaccaggtaatagaattttcacacttttcttcaagcttct

SEQ ID NO: 3258 - DNA, 215 bp, Homo sapiens
gttttactttacagcaagttcaagagtcgcaccgcagatgctgtaaaaacgaaagaagcccacagttgggacgaggattccagttttgcgtcaccgtcaaggcgggaaagttcccggctgtcggttggagggtgggtcctcgccccgccccgccccctcgggccgcccttccgcgcttccgggaggcttgtcccaagctcacggacccctcgctg

SEQ ID NO: 3259 - DNA, 145 bp, Homo sapiens
gctgccacaccccccggcagccagggacacggcttcatcttcctctttctccagcggaaagggggccctctccacggaacgccccacctgctagagtcctccacatcccgaaacgcaacgcccgagagcaggcgcgggtggcagg

SEQ ID NO: 3260 - DNA, 419 bp, Homo sapiens
ccctactgccttctgggctcctaggcttgcggaacagatcaggagtcgccggcattggggtaccaggaggacgcgagctgactacctgactccgggcggcgcaggacgcccgccgcgcgaggggcgggggctaagcgtatcgaggggcggtgctcgagggcgcgggaggcgggagaggctgccgcgccgtgtgccctggcagccgcagccccgccccgccgcgtccggcccggtcctgtcccgcagcgtcccgccagccagctccttgcacccttcgcggccgaggcgctccctggtgctccccgcgcagccatggctcagcacttctccctggccgcctgcgacgtggtcggattcgacctggaccacactctgtgtcgctacaacctgcccgagagcgccccggtgagtggcgcggg

SEQ ID NO: 3261 - DNA, 169 bp, Homo sapiens
attccgtgctgcgccaggtcctaaggccggtctgcaatcgtgaaaggggtggagtgatacccgcccaagccccgcctcctgccccgcctcccgactgcaacctgaatccagtagaggcagcatagcagccattctggaagtggtgtcggtggctcctcaagcccttgaa

SEQ ID NO: 3262 - DNA, 186 bp, Homo sapiens
ctccccagcgcgggtcattcatctcagcctagggaagagaccaccttgcctgaacgtagccaaacgcatcgcacgtgggagccaagtgggagatgaaataatccaatgcgtccccctcaccaccaccacccccaccaaattagttaccgtcggcttaaactcatcgggaatgtccgtgtattttac

SEQ ID NO: 3263 - DNA, 259 bp, Homo sapiens
tagattcctatttaaaagatctacggcggagactccacatttctaagaagctcccggctcgtgccgacggggctgctccgcggaccacttagagaatcccgttcagggtggctcatttcgctaccagaacaccaccatagcgcgggaagcgcgcagcctcttgggacttgcagtccctccaagcccttcatagcggccggccgcttattcctgtgcgagtaaggagcgcccaggccaaccctccggctgcaggctgagg

SEQ ID NO: 3264 - DNA, 149 bp, Homo sapiens
aaaacgcttggtttacaaaaagtcttcccctatttgtttagagaacccgaacgatgtcgtcactggcagcgaagcgccttggcatgaaccgtaggccagctggctcaggaggtggaggcggtgaggcggccacttggggccaccgcttc

SEQ ID NO: 3265 - DNA, 146 bp, Homo sapiens
tgcttttcaaaattacacatttagaccgcgaggggagagaggaactgccgtgaccacggagggctggcctttcccccggcgcagtttctctggaccgctagagcttcccttgagacgaaagcgatggcaggggcccgggtgcgagg

SEQ ID NO: 3266 - DNA, 273 bp, Homo sapiens
attttgtcccacctttgctctttgcggcttttcatttgcgtttgtttccacagcgatttccaatagatttctgcgtggccttgacacagacagctagtgtgaatccccgcccacagaggggcggcacgttggttgccgtacaacgtggtggttccctgcatctctgcccacgtcggagaggtgcgtcggcttccgtacaacacggatactctctctctgacgcaacttcctgtcctgcgcaattctatttgacctttgaactggcaaaggctt

SEQ ID NO: 3267 - DNA, 188 bp, Homo sapiens; identical to SEQ ID NO: 248

SEQ ID NO: 3268 - DNA, 444 bp, Homo sapiens
tgctatgaagatccaagcacccagcaccgtgtgaagcccccagtatgccctcaataaatgctgagtccttctgagttcctttagccagctcagccacagttgggcaagcatgggctgtggccaggcagcagcctacatacaaatgcaaaggagacctgacctctgccccctccaaccattctgctgcaaaacgctgtctcgaggcattgttccttggagccagccacagggctcgcggaaggactagaggaaactgagcaaacctcaattgcttcctcctttcttgtgccactggatatggcagggcggatcagcaactgggaaccttaagagcttgcaggttgagagctgacagagtggacagctggcttagcaggctggccctgggccaggccagggttgcaacctcacgtcctgcagcttccagcgccctcttggacagag

SEQ ID NO: 3269 - DNA, 159 bp, Homo sapiens
gtagcttccgagcagctcccgccgccgccacagccggcgcctcctttccgattcactcaaacaaacaagatggctgccgttacgccgcggctcttcctgccgcccaaatcctcggttcaaatcggcaggatgtttacggtcaaaatggtacctgtgcgc

SEQ ID NO: 3270 - DNA, 533 bp, Homo sapiens
ggcttgctgacgctgcgggccaagccgccctcggaggccgagtacaccgacgtgctgcagaagatcaagtacgccttcagcctgctggtgaggacgcgcccgcccctgggccggggcgcgggcacgacgaacctgtcccgtccccgcacccacgccaaccacctccctccccacgccccaggcccggctgcgcggcaacatcgccgacccctcctctccggagctgttgcacttccttttcgggcctctgcagatggtgagacccgccccaggccctcgggcccccctgcagcgggaggaatcgggttcgacttgtagaaggtgtggcggcacagcctgcccctcctgctcccctgacagattgtgaacacgtcgggggggccggagttcgcgagcagtgtgcggcggccgcatctgacatcggatgccgtggcgctgctgcgggacaacgtcactccacgtgaaaacgagctctggacctcgctgggggactcgtggacccgccccgggtgaggggcggggctgggaggcag

SEQ ID NO: 3271 - DNA, 137 bp, Homo sapiens
gcagcgcctgaagaggcttcccgtccagagtcacctcctccagctccgccatcttgcgtgaggtactcgggtccgtcccgacggcttcgggcatcttcggtaatttccgccaacgcccttcgaacgtaccgagatga

SEQ ID NO: 3272 - DNA, 139 bp, Homo sapiens
tgtcgtgagttccatttgtcccagaatacggtccgctaccgctgtgacatgagtgttagggaaggcgggttgtcacgtttctacaagccttccagtcaaaagggaaaccttgcctaagtccttgtagttgagaaatctc

SEQ ID NO: 3273 - DNA, 107 bp, Homo sapiens
cggccaagagatggcggggtggcgggaggggcgctctggcgaccccggaagcgagaagcaggcctctgcagggccagggatgaaggtgcaagggaaagccctgggac

SEQ ID NO: 3274 - DNA, 158 bp, Homo sapiens
acggaggcgcgggccccagcgtcccttcccccagcccccttaccatgctgcagcccccggcccaggcgtgctgggtccgcaccgcggtgcgcccaggtggctttcttaaagggaaagttgcatcagcctcccgaggctctgtgccgcgccgagttcgc

SEQ ID NO: 3275 - DNA, 134 bp, Homo sapiens
gctgcctcccgcgcccctcggcccatttcccggttcgggcgtgcgctcctctgctgcgacccacggagtgcgacgggacagccacgttttcacatcgggccccgtgaaattgccgccaatggaaaggacttggt

SEQ ID NO: 3276 - DNA, 153 bp, Homo sapiens
gggagagggaacgcagctgaaagcgtgaactgtgtgagtaagaaactttgtgaattggtgtgtccgaatccgtcaagcacgacgtcggagaatttgtatgcgtgagcgagagggacgcgctgacagtaggggcgccgcagggagagaagccga

SEQ ID NO: 3277 - DNA, 212 bp, Homo sapiens
agggctgaataccccagagccgcagacgtttggactcagggttctgaggagctggggttgggcggggggagagggggggcagtggagagtccccagcaagtctggactacaactcccataagcccctgggagaaaatgggcacaactcccatcaggcccagacgttttaggagattgctggcaccaggcagtgactccggcctgtaatccca

SEQ ID NO: 3278 - DNA, 162 bp, Homo sapiens
cgctgctgccgtgggcctgagaccaaggcccccgggccgacggagccgggaaagaagagccggagcctccagctgccccggggaggggcgctcgcttccgcatcctagtctctatcattaaagttctagtgaccgagacccgggctgcgttctctgggtccg

SEQ ID NO: 3279 - DNA, 169 bp, Homo sapiens
cgagcgccgagtcttcgagggcgcgaaaagggcggatacggattcgaatagtggagggcgggccggcggcttctgcgcaggcgctttccgaacgagggaggggatggtggggagcggagagaaagtggggctcggtaattttgtgcggttcttacgtcccgaattcgaa

SEQ ID NO: 3280 - DNA, 162 bp, Homo sapiens
gatggagagccactgctcgtatccttctgccggcttctgcttgagatctcttggcctttacccttgtcccttgacttttcgtgtttgttttaatctttaagacttgaaatggagtggcctttagaaccggggagatactgtaaaccagcagtatctttgtgt

SEQ ID NO: 3281 - DNA, 144 bp, Homo sapiens
aacacaaggctgttggtgcaataggaaggagcccggtcaaagggtttcctgcttttgtgtctgggctgtgattcctgtagtcactgtgctaaaaccttgccataggctccatcctaggtgcccgggagggaggtgggcactgag

SEQ ID NO: 3282 - DNA, 153 bp, Homo sapiens
gggacacgggctgtaccggcccgtcggagacttccgcttccggggccgccgccatcgctctcccgggcttagaaggcccggctactgacgcgcagtgccagaccttacccctcacggtccttaagtctcggtcgccctcgcctcgcagcctgc

SEQ ID NO: 3283 - DNA, 171 bp, Homo sapiens
acccgcttccgcgacgcagaagtctggttgccatggtgcgcctcgcgggattaggggccggtagaggtgggcgggtcgggcggaagtcggtctggtcaccatgggggccgcagacgcctgcactcgggacttcctcttccagctgagaagctgagcctgcgcagtcctcac

SEQ ID NO: 3284 - DNA, 145 bp, Homo sapiens
agcttcccgtttcagccccatcctcgagaatgggctcctttcctgctccctctccgctcctgctggcgagtggagaccggcacctaggtccagacgcggctgcgctgcctctcctagccatcgagacaggatgtgactccctccc

SEQ ID NO: 3285 - DNA, 147 bp, Homo sapiens
tggagcccgttgagcctgggtggccgctccgagggcgggtctgggaaagtttgtgccggggcggccctgatccggcggcggcgcggctcggccactttcaccgcacgcggggccggtgtgaaggtggggcggccgccgccgtgcaga

SEQ ID NO: 3286 - DNA, 174 bp, Homo sapiens
aaccaccaggcattcacaggtgaggaagcccctcccacagcggccggagtttcggactcggagcgcgagaaacgtcgggatagcgcctgcctcgcagagcttccgcttccggcccttcaggctctgtctctgtggagactgggctttgggagggagaaagagggacctagcgcg

SEQ ID NO: 3287 - DNA, 306 bp, Homo sapiens
agacgcctcagagaaactacctttcagaccttcgcggcctctcctgcgcccgcagcgcccggcagctggggacccgggcttagccacatcgaccgcaacgttcgcgcgccaccttgtgtccattcccttagcctccagggacaacccggaaaccacatttcccagcgtgccgagcgcctctgcgcaggcgcaaagagtttccctcgttgccatgggaacctcgccccttctagagtcctggccgcttgactcagctaagcgcgaaggtgttgtttcttcctgaggtgcgctggggctgggacccgg

SEQ ID NO: 3288 - DNA, 162 bp, Homo sapiens
tgagcgcggcactgttggggggcaggagaaaggtaagacttggcactgacgcgggccacagagcacgcgggtcaccacgacagctttcgggtctcgccgcccggcgctggcgagcagccagccagcgtctcgcggcgggtcccggtcctcagcccgcggccc

SEQ ID NO: 3289 - DNA, 187 bp, Homo sapiens
atgaagttcaagtcaaccacatgtatcgggtgcgtactgtgtgccaggcaccgtgccaggaccaggctgtgcctctgctctcagggaactcacatcctagggtggagagaaagaaacgtgaacagatggtcactgcaattctgcaaatgcagcacgggagaaccatggaaggcgggtgaggacaggg

SEQ ID NO: 3290 - DNA, 139 bp, Homo sapiens
cggcgtccctgcagccccccgcgcggccccagtggatgccgaagccccgacgggacacacggtcctgcctgggctcgcagaatggctttttattcccaaaggctctgcgccgcgcacctgggcccagcccagggtgggc

SEQ ID NO: 3291 - DNA, 216 bp, Homo sapiens
aaaggcaagtaatgaggaaattaactcatgctcctagcttcgctaggaatgtgatagagaatttcccctgtaggttcttcgtatggtgcgctccgctggatcacgtgagccagttccaaaatggcggcaggggtggccgggtggggggttgaggcagaggagttcgaagatgctcctgatgtggagccgctggagcctacacttagcaacatcatc

SEQ ID NO: 3292 - DNA, 181 bp, Homo sapiens
gggcgggggcaggggttaccaggtggctggctgtagacctgggcgaatgccagctctcttcagcttcgtcccaactgcgacttctgctccattcttctaacagccctttcaactccgctcggctgtaaccgcagactcgtcactaaaacacccacctaagcgcgggccttggtttctcctc

SEQ ID NO: 3293 - DNA, 137 bp, Homo sapiens
gcaaggactaagggagtccgcagcctggggcattggagcccttcgccatacccctagtgcgtcctcaccccctcagcccgtgcttcccagggcgggtatcctcggaaggcccggccctcacagccttggcaggccaa

SEQ ID NO: 3294 - DNA, 216 bp, Homo sapiens
acatgatagtggttggccagtcaatgaggaaacgtacggtgggcggccgggatcaaaatgaaagccataaaggaagcgcgctgatcgtgctgttccgggggtgttaatcacagtggatcccctgggagaggacacgtccctagtcccatttcacagatgaggaagttgtggctcagaaaaggggcggtaagcggagaaacccaacacttattggtc

SEQ ID NO: 3295 - DNA, 353 bp, Homo sapiens
gggttcgaccttaacggagggcgacagcgggctctcgagagggtgtatccccaggcttcgggacgaggtcgcgcaccgcgcagaaaccggaaggctcctggcggtggactgcgccctcacagccctacgctgagagagaatcggcgtgagtctccgccctcagagcctacgacaactctccagactccgccggagcaggcgcagggggcgtggccttggtggcaccacccccaacagagcctggtcagtgctgaagactgcgtcagtctggctctgccgccccgcccactgaagccgatagctggagcaaagctcggtcgggcgtcttccggggtcgtcacgtccggttgcca

SEQ ID NO: 3296 - DNA, 701 bp, Homo sapiens
agcaaggaggagcttccagaatgaagggcgccgtcacgcctccctgcctttgctcaagcggttccttcaccccgatcaagttccttcccatttctccaactgtggggatcctgaacgtgcacctcctcagagaagccctcttgggatctccaattctagtttattgccccctcctatcgatcccccagcgcgctcatcgggcctgtggacaacgacaggtttgaggagaggattctctggatcgcggaggactacagaagccgcgcagccccttctgaggatgccaaaggggcccgggcagaagggaagtggccgtgcccgggcctgcctaccactagatccccacccacctatgactgttcagtcctgctctcctaccaacccacctttcccggcccaagtcagcgcaccccgccgactccctgcccagtccaaactccgaggctgggcaaggcactggatccacggctggaccgacccggggcagcctctgggtgaacagcagcgtgtccgtcggcagagaaccgagaccagcgagccgaccatgcggctgcacagacttcacgcgcggccgagcgcggtggcctgtgggctcctgctgcttctcctccagggtcactatgaggctcccgcggaggggtgacagggaccgggctcagatctgccaaatgctgcggaggcagaacctgacagtgcgggag

SEQ ID NO: 3297 - DNA, 150 bp, Homo sapiens
cacttctcgtagagacggcgtccccgacaacgcctcgggaaagaacctaaccaacatgcgaggaagtggcgccaggctcgttcttcaagagaagtgacagaactaaccctcagcctgcaatcctgaccagggccgagtcccgagcgcctc

SEQ ID NO: 3298 - DNA, 164 bp, Homo sapiens
agaagagagcgcgagagagggtgagtgtgtgtgagtgcatgggagggtgctgaatattccgagacactgggaccacagcggcagctccgctgaaaactgcattcagccagtcctccggacttctggagcggggacagggcgcagggcatcagcagccaccagca

SEQ ID NO: 3299 - DNA, 153 bp, Homo sapiens
cattttaacagtatctccggtgttgctgatgccgctggtcccagaaccacacactgcgaacaactggcctagaacgttgtcattcctttctcctacagattttgaggcagccggtgggctccgaaacaaaacagaggtcactggatccgattc

SEQ ID NO: 3300 - DNA, 174 bp, Homo sapiens
aaggacattaataagccaagacgtggaaaatcatccctttgggtgcttgtggtatatagtttcgaatgctgctgctaagagacaagtttaatgagattcttctactaggaaggaagtgaaaaaggcattgccactacccaccgtgaagctatctgcccttcttttctctacttg

SEQ ID NO: 3301 - DNA, 166 bp, Homo sapiens
ccccgcccttcgcgctcggtttgttagttccagttccggccgcgagggtggagctttgtgcctcggaggcgtgggtgacgcaggcgcagcgcgggctgcgcgcgctactgcccatccccggttgtcccacttttgttcgcctctcttcggccctctactcaagagc

SEQ ID NO: 3302 - DNA, 136 bp, Homo sapiens
acggaaggacctggggtcggccaggcctgggggatgggacgggccccgaggagagcgggtgccaggggcgagacccgccgcccttccccggcttggtcccgcgcttcctgattttctcgctccacgcctcccattc

SEQ ID NO: 3303 - DNA, 171 bp, Homo sapiens
cccagacacggccttcccggcgtgccacgcgcggaggggactcttaacgtgaagcgctgggtgactcagccgcgtggccgcgcggtccggggcggggggcgcgcgccgctgcggcacagccggtcccggctgcggcttctggctgcgcggcctgcgcgcgcctcccgggcg

SEQ ID NO: 3304 - DNA, 172 bp, Homo sapiens
gaaggggtgcgcgcgcgccgtgccaattacctgggtcacgtgacgcagccgcccacgggcgcgcgcccctgagactccgcgcgtcgtgacgtctccatggatgccccgccccgctcctggcgctgtccacggtgctggcggcccaggcccgaggtcgcccacggccgaaggg

SEQ ID NO: 3305 - DNA, 144 bp, Homo sapiens
cctctgctcgcattttcactctgccatgccctgctctgaagagacacccaccgttacccccagcaaacaggctggtttgcagaggaaggcagcatgcagctccgttttgccccattctctgagcaggccacaaccctgactcag

SEQ ID NO: 3306 - DNA, 131 bp, Homo sapiens
aaaaagaaagagagagagagagagaaatagaaaagtgatggcttttatttgtgaggctggcctcagcacgcggcccaagaaacagaactgaaagcggttgcagtgggcgtggccaggagggtggtttggct

SEQ ID NO: 3307 - DNA, 168 bp, Homo sapiens
gtattgtaaatgtacagctctttggtttccgtgtgcagatttccaagttgatcgtgatgttgatccgggactcggtgtggtgacggcccgccctgagcacgaaagtgcacgctcttgacaacttccttatgtttggagctttctccaccaccacccccgcccattttc

SEQ ID NO: 3308 - DNA, 146 bp, Homo sapiens
gcgatctcaaaacgaggggggtgcgagtatgcgattggagaatatgtaactaatagaagtatcattttcccccagtacgatctttcaaggaaaaaaaaatccattgaaagaattttcaaagtgctgtcttcgtttggagaaaaggc

SEQ ID NO: 3309 - DNA, 155 bp, Homo sapiens
aaactgcccaatcaggcacgcagccagagaggaggcggtggcttccgggatgtggcgcgggtctttgcgtctggctactaccagaccgcgggttaggggcttcatctctctgcgttctcagttgtgggaggccttggtgattcggccacagctca

SEQ ID NO: 3310 - DNA, 150 bp, Homo sapiens
gtctcctgccggggcaggtcccgcgacagctctggtggaagcagcttccggcttctgcggtgcgggcggaggtggcggggtccggccctcgccgtccagtccgcgcgaggcggtgcccgcccctagatggccagatctcggcggccggtg

SEQ ID NO: 3311 - DNA, 118 bp, Homo sapiens
acacaagcgcggaatccggatccgagggcctggcagtccagtgtccgcgtcttccgggtgactctggttgtcccggatcgcggcggcggcggcggtggcggcggctgagggacccgcg

SEQ ID NO: 3312 - DNA, 297 bp, Homo sapiens
gagccctaatcaattgcgaggcagagcaaagccctctgcggacagataaagccagtcctgcgtcggtgcccagttggagtttgtgtggtttgaacttttgtgtggtttggacaagttcgccgggttttgctggggcggtttattctgtttccaaactgcagtagagggaggcaaacggcccttggaccctacaagccactcctgaaatacgataggtggcctgtcctctctcccgcatggtcccaaaggctcagggaagagaggcagggcaggtgcgggccataccccgccctcctg

SEQ ID NO: 3313 - DNA, 151 bp, Homo sapiens
taaaagaaaacaatgaatctgaataagaaatgcatggtttttggcatcggctccagcagaacactgctctccctcccgcgtgtcactcgcgccccgtggatgtcccgcggccgagttccgacgcgtggcaggcgttgtcctgcgtcacaaa

SEQ ID NO: 3314 - DNA, 141 bp, Homo sapiens
attcatttcttctctctggcctggaggaggccaagccaagttgcagttcaggctctggggagcagcggggccccccagtgaacctctcaccgtttggtagagggtggcactctgggggctcctctgtactttcctaaatgg

SEQ ID NO: 3315 - DNA, 226 bp, Homo sapiens
cagaccttcccaagggacatgggagtggagtgacaggacgcactcagctcgtggccccactgatgagcttccctccgccctatgggaaaaagtggtctcatacagaacttataagattcccaaatccaaagacatttcacgtttatggtgatttcccagaacacatagcgacatgcaaatattgcagggcgccactcccctgtccctcacagccatcttcctgcca

SEQ ID NO: 3316 - DNA, 132 bp, Homo sapiens
ccagtagggaaagtttctgccatcttaaatgtcatacacagagatgaaaagatgcacagactgaacgtgcatcaccagctcaggacggccacccaagaagaaccttgggaactggttttttggtaaattaac

SEQ ID NO: 3317 - DNA, 266 bp, Homo sapiens
ttctggcccccaatgtaatcgacttccttttggctaagccaaggggagagtcatctagtcagcatgtagctgcatgctggcagcctgggcctctcgtgccggacttgttatgggagttcagcaggccgttggtcttttgtaacctacgggaatccacactcatttcccttactcggggttaggtcttgcattagtcaggaagggccgcctgctgccagggttgcaggaagtacggtaccttcttgtagtttctggagcctttctca

SEQ ID NO: 3318 - DNA, 137 bp, Homo sapiens
aaaaatgaagaaaacagttccgagcgtattacggaacggagtacacctcggagtacgggctccagacgagggaacgcaccggcgttgccacgcccaccttccccgtccagccggaagtggcgcggacgcctgctcag

SEQ ID NO: 3319 - DNA, 147 bp, Homo sapiens
cccaggacttctgctgtcactcaggatgcagggggcggggcctggcgctccacccaatcagagtcgccggggtggggcccggccaactgtttatccgcgggtcacattgccgttcgcctcagtctttggcccctcccgccgggtgag

SEQ ID NO: 3320 - DNA, 139 bp, Homo sapiens
ccgaggtcctctgagcacccaggctaagctggcctgtgccttcaggaaacggaccatcggctcccaccccgctttaccccacccacgatggagcacgaagcaactctgacccgcaggagtgtgcgtgcagggagtgaag

SEQ ID NO: 3321 - DNA, 145 bp, Homo sapiens
cacctgaagcgcctcctttctttccgccttagcggttacctagtcgtcatctcggagagctgcgctgaggggggtcgcttgcccggcttcaggtgccccaaccgagccagggcaggctgccggaccctctcgagctcctccagtg

SEQ ID NO: 3322 - DNA, 147 bp, Homo sapiens
gcatccttagcggtccaggcatcgcggtgcccctcgggcccctacctggactaggcccacagccgggctctagggggcgcgcgatccacctccagaaggccggctgcgaaaatctacccagctactggcgacgtcaccgcaccgtag

SEQ ID NO: 3323 - DNA, 156 bp, Homo sapiens
ccggtggtgggtgtcccgggaggcggacttccggtgcactcctgcgcgtgtgcacctctccctgcgtgcgtgttcgcgcgtgcgtgcttgcacatgcgcgccacctccgcactgccctggcttcctgcgcctcttcaggtcatcgcttgctctcgt

SEQ ID NO: 3324 - DNA, 145 bp, Homo sapiens
aattccactagttttgcatcacaaagtagtggttgaagtaaagttttgagtaaaacgccgtgtgtgtggtttttgtgggtggttgcagctcagaacaacgtttaggcctcatcaatcatctgacaggagagagtatgatggcaat

SEQ ID NO: 3325 - DNA, 279 bp, Homo sapiens
cagatgctctctcgttggaaattggcacgcaaaccacaaccacgatggcggcttctgagaggtggaggagaggggtgtggcaaagcagcaaggaagggggtctggggtccagcccagctgggacagtgaaggttccctgttcaagggtaagtaggccttgatcacctgcttcaggtttgtggcagatgaactgataaaatgcaatgaaagacaagaagccagtgtcagcacgtaacacgcatctttgatgtatgatcaggaacaaaatcatgggcagcc

SEQ ID NO: 3326 - DNA, 141 bp, Homo sapiens
cggccagtcagaagagcttgtgcccaggatttggggctggggaggaggcggagggacagcggagtaactacgaggacgaccacgaggatgctctcgggaaatcgtctaacaaacaccccaccgtgaagaagggacacaaag

SEQ ID NO: 3327 - DNA, 161 bp, Homo sapiens
ggccgaggtggctggacgcgtagcaggtggaaggagggagggagccgcaggcgcagacccacccgccatgaagccccccgcaggtaccgactaccccgctcgccggacccgggcgtcccctgcaccctcgctcctcccggggtcgcgacttgggcctaagg

SEQ ID NO: 3328 - DNA, 168 bp, Homo sapiens
ccgcgcctctccagccctgagctctctgcggcctaatgtggacgggcaagcgttgccatgacagcgccgcgggtggggatgcgggaggctgagcgcaccggccagctagcccctttgtgcggcgggggctgcggagtgctccctccaagaccggttgcaccccgcttt

SEQ ID NO: 3329 - DNA, 143 bp, Homo sapiens
cttcccaacatggagcctccgcccgcagctccgtctgcacgagggacgagcaaaggctggttggcgtcgcaggctacgacccccagcggcccgcgccctcgcggcccggccccttcccttccgtcccgccaggggccgtggaa

SEQ ID NO: 3330 - DNA, 139 bp, Homo sapiens
cgcgtggttctttcctcttcagcgcagagaacggaggtggagatgggctccggtgctcccgctgaacagggacggtgcgcagtcattccccgcctgcaccacgcggtggcagcagcagcatgggctgaaggggctgttg

SEQ ID NO: 3331 - DNA, 280 bp, Homo sapiens
tcccacagggccgaaacccaactcaccggcagacaaagacgaccatggcaagtcggagattccgcgcctgcgcactccttccgcgggcagcgctcccagaggtctcctgggctgggccaggccccgactcagaaccggacggaatcgagagatcttggcccgtcctccgtgccactcttttgagggtagactacatttcccagaaggttcagcggtttgagtcagcttttcgcgcgaacttttcctccgccagagcttgtgggactgtctccctggccgg

SEQ ID NO: 3332 - DNA, 156 bp, Homo sapiens
tctgctgcgctcagctcccgtggcctgtgctcgccgctcgcccgagctctcctcctcgcctggcgcgatctccggcgcgagcctcccaaactgctttataaggcgggcggccgctttgatccgcccacgtcagcgcgtcgcaaccccaccgggtgg

SEQ ID NO: 3333 - DNA, 148 bp, Homo sapiens
cgaaggacagagacagcccaggcaggggcggctcctcccggccacaccgacctgcccttcgcagggtgtcccgggccagcggaggcagagaaaaccagcttgcgggaacgcagtcgctcccagcaccagggccgggccagtgcgggta

SEQ ID NO: 3334 - DNA, 209 bp, Homo sapiens
ggacccttctgtcggggctctttgttcgccgcccctcggcgttccagctctcaaccttgctcccagcagcccccgccggcgcactcgacctacaggaaagttgctcccgagctgtggaggggcgtcatcgcctcctagcaacgctcctagcaaccgggtaacatctgctccctgtggtccaatgcgagctgagaacagctgcgcgcccg

SEQ ID NO: 3335 - DNA, 148 bp, Homo sapiens
gctcgcactgcctccccctacagccctttcaattccttggccttcagctgctgcggcagcagccgtcgtcccccctcccttcgcccacttgcccctcgcctcggaggctccggtgtgccgccttggccgctgccgctgctgcaacttt

SEQ ID NO: 3336 - DNA, 282 bp, Homo sapiens
tgctcagcccagccccagagatgtgttttcgtttcatgtgagttacagtttatgtgtcaatatgtcttaaaagctcccagggattttaaggtgcagccaagattacgcacccagcccttcttagcaaatgaggctgaaaccactgagcccagttccggctgtaggtcagggcagtgcgtggagaaacacatctggcttctggcccaggttcatccccctcaccctgcaatctgctgcatcgcttgctcacaacgcttcaaaacataagtgacagattctaaa

SEQ ID NO: 3337 - DNA, 142 bp, Homo sapiens
ttcccaggattcaaaactctgccaaacagaaacgattaaccttgaggtgggggtggaagaagtgagaggaagtggactgaaaggggtggagttgtgtcaccaactccctcttttagtcagcgtcctggtctttaagcatcaa

SEQ ID NO: 3338 - DNA, 292 bp, Homo sapiens
gctgtccaacctggacggtgacctctgccctttgcccgaccccgtaaccagagacgccactcctgccctccctaacgacgcgggcctttcagacgcctacgcgggtcgcccacctgactgcccgaaatcaccccgcccaccaagtgtcccctcttcttcctggaatagtctcggtgcacagcctcacgtaacagggccctcctgatatggcgagactccgcgctcctcgtcactcacggggcaggcgctgaggaaggaactgtcaggcaccgcggggacgcctttccgagcg

SEQ ID NO: 3339 - DNA, 354 bp, Homo sapiens
caccctcccgagaccttccccatctgtacaatggggacaggacaaggcccagcaggcaggctggcgggggttccggcgacagagggggacagcgggcgagcacgacaagagcacaggcccacgtgcgcaccggcggggaggaagtagcccggcgccccgcccgcagcgcggaccggaagtgctgccgtaatctgcgctgagagtcgcgaaagcgctgttccccttagtgaccggcgacgcgggcaagatggcggcgctgggggtggcggaggccgtggcggccccacacccggctgagggggccgagacggctgaggcggtggagctgagccgcgccctgagccgcctgctgcc

SEQ ID NO: 3340 - DNA, 168 bp, Homo sapiens
ctggaggaaggaaaacagagtgcagctggcagagactgaaggaagtgctgcgggcctggggtgcccatctgttcacctcggagctttgtagacactgcagtcttctcgtcattgtttacatctttcttcctttgtgccattttcagacaggttgtgtctcttcctcca

SEQ ID NO: 3341 - DNA, 150 bp, Homo sapiens
tgggcgctcccggccctccagcccccaactccctcgcgcacccgggacgggtgaaggcgcccagctgccgagcatacccgcgacgcgggttcaaatcccgccggctcccaggcaccctcaccccgccacagcgcgggctgtttctcctcc

SEQ ID NO: 3342 - DNA, 169 bp, Homo sapiens
acaggggtttcctcgctgtccacccctctggcagaagatggattgggctgccccgtataaattaatgaaaagattaaagtttcgctaaaggggacatcgagtttatgtgtcatctcctggtgtctgtgtgcctgggatctgcaatatatcccagcccttgatgtactgt

SEQ ID NO: 3343 - DNA, 168 bp, Homo sapiens
taataaatgaatcgcccaaaatatcgcgctgtgggtcgggttaataaccctattggacaggagctggcattactcggtttgggcggccgagcccagacatcagcatatgtgctaccgtagtaccctcttctggccgaatacaaaatcaagtttatggggccgctttta

SEQ ID NO: 3344 - DNA, 143 bp, Homo sapiens
atcccaggggcttctcggaggcggcgagctacaccacatgtcctggggcctgtaaaccgcagctcgaggtcgtctgtgggtttagctcatttcccttcagcccacctgaagtctccttcttcctacggtcacgaaggatctca

SEQ ID NO: 3345 - DNA, 143 bp, Homo sapiens
cggggcccgggccaggagtcttggtgcaggcggactcgggcgcgtgccatgggaccacaactcccggcacgcaccgcggactgcgccgaacacggttggctgggagatccaaccctactgctcccaccggccaatgggacgga

SEQ ID NO: 3346 - DNA, 160 bp, Homo sapiens
caggggctggaggtcgggcaggtggcctggggcgggcgcgaggttgactctggctggggagatgctcgctgttatgggacgcccccgaccgccccatacctccctgatccccttcctgagtgcccgcggcgtgtgggctgccgacgcccacgcgtttctg

SEQ ID NO: 3347 - DNA, 146 bp, Homo sapiens
ctttctctccaaggacggaaacctcatccaagcagtcccagaggaaacggataaaggtatttgaaagggagcgagcggccccaaatcgcacaattgagcggctgggggagttatgcgccagtgccccagtgaccgcgggacacgga

SEQ ID NO: 3348 - DNA, 150 bp, Homo sapiens
gaggtaagtgctcgcggcccctttaagcagatacaaaggctcggcttgttttgttacagttcattctattccgcgccgcggagcgcagcggccggcgacaggagacgcgcgcgcatgcgccccgcggccgccagccggccggcccacccc

SEQ ID NO: 3349 - DNA, 137 bp, Homo sapiens
gtttcctaaactcagggatccttggctgtgaatgcagacccactgtaaacacagcaccagcccgggcagccctgcgtctcccctatggaggcacaaaggtaccaatgcaaacaggaagctcatgctgcctgctgtgc

SEQ ID NO: 3350 - DNA, 139 bp, Homo sapiens
acaggcgtccgtgaaacccgcatctgattctccgaatggcctttgtcgcctccctggaccctcacctccgcccatgcgcgctcgtcacagtggggcgccactctgccacctcttaatcggcttcctcctggaaggagga

SEQ ID NO: 3351 - DNA, 161 bp, Homo sapiens
tccgcgcacgtcctggcgcccccgtgtgttactttgggggatcgcagtctccgccaatccagagcaggcttcgcgggggcggtgcccaggctctctccacctcctccacccaccacgggttgcccacctagaaaaggggaaagcgataccggctggccacg

SEQ ID NO: 3352 - DNA, 176 bp, Homo sapiens
gtgagcagcacccgcgtcaagcccaggcacctgcacagtgccgcggcaattgccgggggagccctagcaaccttcccgcgtccttagttaccaaacaggaaacgctccagcccgaaggcgaaacttccggttgagaactccctgcctgcaggccgaagaatctttttcttaccttg

SEQ ID NO: 3353 - DNA, 145 bp, Homo sapiens
ccccacgtcccaggtacagaagcgcctgggacccgggaagcgcagacttaacacaacacagagcaaaactcacccccgcggtgggaccgtcactccacgcgacccgcttccgggtttgtgcgaatctgctctctggggacagaag

SEQ ID NO: 3354 - DNA, 264 bp, Homo sapiens
tatcaatttcaatgaactagagaccgctgtagggaggttgtgggaactgttcagaacggcttaatctgggaggacacgacttccactgagaatgcatgcgctgaacgacaattcgttttcacctcaaaaacctgtactgcagttttgtctctccttccgtacgatgacccaagatggcggagccgtgattgaaaacccagattcaagatggcgacttcctgcttccccgatagcgtcgcgcgtggccaccgaggccacgcctac

SEQ ID NO: 3355 - DNA, 336 bp, Homo sapiens
ccgcagccggcgctccgcggccgacgcgcccaccgatggggtggttgatgtagggggtcccctcggggtccttccgccgctgctgccggtgcttgcgagccgcgaagtcggcagcctccagcagctgcgccgcctcagagcccatcgcgcggatggggccgacgactgcggccgcaggggcagggacggaacgtttacagcgccccctggcgccggggaggcccggggatcgtggaggctaattcagcgggccgagttgggcctgccccagatgaattcctctggagctgaccggcccgcgcagagagcaagtgatgtggacagctgccttcagca

SEQ ID NO: 3356 - DNA, 353 bp, Homo sapiens
cgcaaacattattccgttcttactgtaaacggccccggccacctttacgagaaaccaggaaacttctgagagttactagcagcgtttacgcgggcaaactgagttctttttctttctctcccggattgttcgaagtatctatcgggcggcttcgatgccaggttcagaggcgcgccagggagagggcgccccgcagaggagcgcagcggagaggcctacgcaggtccccggtgcccgcggccctcggaggccgggccctgcgtcttggccaggcactgggtggcagctgaggctggtggcccggagccctcgcggccgcgggcaggccccttcttgggcagggtcgggcactc

SEQ ID NO: 3357 - DNA, 153 bp, Homo sapiens
aggcagagcagtcccaccctgcgtggccgtgtagctgccagaaaagatcgtgaaggtcatcgtagcccgcgtctaacccgttgagagtcgtcaggccggccagccccagttcttatctgttgtggcagatacgattgcttgctcatggttcga

SEQ ID NO: 3358 - DNA, 273 bp, Homo sapiens
cctgcagagaggatgaggtgagggcccacgggaacgggaaggtaccagcccaggggtgggggtgcccagtgaacccctagccaggaggctctctccatctcctagggcccctgcgggtccccctttgcgggcattccaggcagagaagttctgcgctgccgagaagccagcgttcaggaagggagttggcgggcaggagggtggccttggtttgggatttgtgggtgtcaaggccgcatctgcgccagcctcccagcctggagtgggtggagg

SEQ ID NO: 3359 - DNA, 135 bp, Homo sapiens
aggagcgggaggagaggggccacgcttgtcttctccgagggatgggaatttccacccagctggaagtaataagcgcccgaggctcgggcctcactgtctccacccccgctttccctttcctctgaccaagtgaca

SEQ ID NO: 3360 - DNA, 225 bp, Homo sapiens
gtggctccagcttccgggctccgactccctaggggcgctcccggagccgggaagccttggggcgagtgggcggggctcgggctccagccactcagactaccaggggcgggggcaggaggccgaccccagccacccttaaagctgccgccccctctgagccccagtcctgctgggccgtccgcccaacccgagggcccctttaagaggaagggccaaggccaggga

SEQ ID NO: 3361 - DNA, 138 bp, Homo sapiens
ctccctacgccgagccttctcattatcattccgggagtaaaatgtgtctcgctcaacatagttttaaaatcgttattattattttcctgagcctgaagccgggccaaggcgcaggcagcgcccagggtgcgtggtggc

SEQ ID NO: 3362 - DNA, 167 bp, Homo sapiens
ttagtgacagcaaaacttccgtgacagcaaacaagtaaaccacaggaacatccctggtctgctcagcacagcaggctcttgggttctcagagagcctgggaggacttttcagcttgtcttatgtgggtttgttcaccccgtccggtttcatttttatttaaaacaat

SEQ ID NO: 3363 - DNA, 284 bp, Homo sapiens
acccgcccctggagcgccgcatccggtagcgagagttcaacttcctgactaggagccaatcagcggggccgcctcgctgtctacgacagagggtggggcagacgctccgtttccggtggcagggtctggggaagcggcggcaggcgccatgtccggccgcgaaggtaagtgttccggaaccgtgaggactgcggggacggcggggtggggaccgggcggcaggggcaggccgaacgtgctcgtgtcgcccacaggtggcaagaagaagccactgaaacagccca

SEQ ID NO: 3364 - DNA, 208 bp, Homo sapiens
gtggcggggtgctggcgcggcgaagctggagaggcggggctcgcgggcgcctgtaggacctccgctgggaggggccgtgctcgccggccacgcgccggttttcactccgctctcccccaagggcagggacctacaagcatttcccttctcgcgcgtgactttggtagctgagcctcatatctctctcgttttttggggggagggggga

SEQ ID NO: 3365 - DNA, 143 bp, Homo sapiens
ctcagttcccagcctgcccggctcgctccgtcgaccccacgtccactcgccctgcctcgccgggcgaacgcagtgctagcgcgccacctcgtggttccttcgagctctgcagctccccgagcccggcgcccggccaagcctcg

SEQ ID NO: 3366 - DNA, 214 bp, Homo sapiens
cctctggcgcccaagcccgcccaccgatgagccaatcgccgcacggcggggcccggcctttcggagtttccagtccgccaaccaatcagcaattgcctctccgcaagcccgcctgcttgcgtcaccgacggacagcaccggttccgaatgggagagccgataacgcttaacccccagctcactctcaccaatcgctataaagattgtccggatg

SEQ ID NO: 3367 - DNA, 142 bp, Homo sapiens
aggtccacctgcctgagccaaaattctcacgcctccacagagcaaatggactccatttcccaagataccagcgaaacgcctgcgggagtctaattgcccggtcgatgcgcaggaaatttggctcccgcaggcgtttcgcgag

SEQ ID NO: 3368 - DNA, 387 bp, Homo sapiens
agctggcagacctgggccttgccattggcgatattactgtttatacctctgggtggcacgtgggaaatctcttttgtgctgggaggtaggtttgtcttagtgtcttgagccagaagttgtggttgagctttgttctcagctgtacttgttggttttctgtgtgacctgagaagcatccttcgtccgagctgaagtgcacctccgaggtgctggcagcagcactgatttgtgaagcattgcgtgcagcaggagtagctggcagaacaaagcctatctcaagttgctggcggtctttcacatcttgtacaggacttccttccgttcttacctctgcagccagttgtgtggcttccgtctggaccgtcttcctcctttccaagataacca

SEQ ID NO: 3369 - DNA, 158 bp, Homo sapiens
cagcagtggggcctcaatttccttttcctgttcagggcgtgtgcacagaagctggcatgtatgccctgcgagaacggcgagtccatgtcactcaggaggactttgagatggcagtagccaaggtataggcctccatctttgtgcctttgccagtggtg

SEQ ID NO: 3370 - DNA, 166 bp, Homo sapiens
agccaggccaggcagttgctgagccttcccctcccctcctggcgggagtgtgtgtgcaaggggccagggggcggagtcggagaaagggttgggggtgtccgtgtccagcgctcctccggacgcggctccacaatccagctgcgagaacagatggacgcagcggcgg

SEQ ID NO: 3371 - DNA, 1181 bp, Homo sapiens
ccttaccctcacaaagggccccaccgccggaagccgcccgcgctcccacaccttgtgcaggtctcccctgaaatgaattttaatttccgctgagggcaggcggcgtcgtgagtcctgagcccgtggcggcggcggcggcgcgggtgtggggccgcgcggccgggagcgggcggaagagagcgcgaatttgaatttcaaaggcatctggaacccaagtgcttctgcgttgcccgattgtgtgtgtggcgcttttgtgtgtccgcgaatgcgcgcgtgcgtgtgtggcgtgtgtctgggtgttttatgactgtcctccgtgaggccgtgtgtgagcccttgcgtgggccgtgagtgcggcagggagcgcggtgtccgggggccgcctgtcggtgtgtctgtgcgtgcttgtgcgctagcctttgcctctgcgagtgcgtatttttaggaccgagtctgtctatatgagcctgtgtctgtgtgtgtgcgctcccggccctgcgtgtgtctgtgagcgtctgccggggcgcgtgtgtgctcggaaccccgcggtggtgtgcgggtgtgtccgtgtgtctgtgcacgtgcaggcgagcgttcccatctgtgtgtgtgcatctgagtctgggctatgtgtgactcagggaccagtctatgagcctgcctgtgcctttgagccgatacctgtgtgtgactcagggacgagtctatgagccgatacctgtgtgtgcttgggtgtctgtgtcgtggtgtgtccctgcaagcgtttgtgcctgcaggtgctggagtgtgtagctgtgggaatgagtgcgtgtgagtgtgcggaaggggcaccgcgcgagggagcgccggtgcggaaggctaagcgagcccgcgccctccacggacggtgccgccaccccctccctccgccccgcgctatgtgcccctgtgtgcccgcgccgccggggccgtctctgggctccgggagggggctgagcgagcggccctttcctcccagggaccccgggcccgccgccagccctgggcacacccgccccttcctccagcggccccgctcgctgacccacgggcactcgatgggcactcgggaggcaatggccggagaggatgggcagttagcgggagggactgagtggcgccggcttcacgctcattctgctgagggcttgggggcagctcat

SEQ ID NO: 3372 - DNA, 143 bp, Homo sapiens
aaggatgagagacctcccaggaacaagtaggtacttcaggagatggtgtttcgcattcagtaggtggcctctcctctccgggtccatgtgaatcgatgccccgcgtggtgttagggggcactgtctgcactgagctgtttacc

SEQ ID NO: 3373 - DNA, 147 bp, Homo sapiens
gaaagataacgacatccagtcctggagctgctggttaaaaacgaacgtgtcaccgggtcccctgggtctgaggccacgcggcacgcggcccctccgcgatattcccgcacctcgcggggaaaaggccgctcggcggccgggcctggg

SEQ ID NO: 3374 - DNA, 344 bp, Homo sapiens
gctccaaccacaggcacccactcaactccgcttacggaggcattgggactaagggttacggtcctacagcggggtgtcggcccagcgagaggaagagggccgaacggacccctcgggctcccgtccctagggaaatgtgaagtatcccgggagaggtccgagggcggcggcggcggcggtgaaaagccccactcctccgcgtggaccgggatcctcaggggtgcggcgccaccccacgtgctgacgtatggcccagaagccgcctcatcgcaccgccccaccagcctggaggagcgggctctgtcccttggcccagcggcacgcgaagcaggaagtcccacccc

SEQ ID NO: 3375 - DNA, 147 bp, Homo sapiens
ctcgatttcggcgggacaaaaacaatcttcgcggctcgtcagcacattgcatgctgggatgcgtgagctattttcttcggaaggcagcgaattgtattctgggacttgtagtgtccgcctggtagaagtggatgtaacggtctgtta

SEQ ID NO: 3376 - DNA, 150 bp, Homo sapiens
tacggcttggggcggccgggcccggcggcgggctgtgtccgcggggagcgtccaggctgggccgcaggaccgggcgcggagcctcgcagggtcgggctcgggctccctaaccgtctccgcttcttccgccagtcggtggccgggctggcg

SEQ ID NO: 3377 - DNA, 156 bp, Homo sapiens
ttacatgctagacttgtcagagacctctcagagagcgtgacatttgagtagcagctgtgcaaagatttaaaggaagagcattctagacacagggaaacaggaagtagaagcctctgaggcgtgcagcaggttggcttaataaataacaagaaatga

SEQ ID NO: 3378 - DNA, 180 bp, Homo sapiens
ttcagttagcttccaagaaggcagattccgtcaggggcaaaacaacaccactgatcgtgcaaagagaagatagccatcaaagagaaccacaaaccaacaccacagatcgtgcaaagagaagataaccatcaaagagagtacacatcgacgcggcgcccagtccagaaagatagagcgctg

SEQ ID NO: 3379 - DNA, 1261 bp, Homo sapiens
gaggaaaagtggctcctctgggaacccggatgggccgaacagcagcttccggcagaggccctcaggtttcagagttctccaagtggggagaagggcggcctgctcagcccgcgcacccgtggcagcaccacagagggaataaaagcagggtaaacaatttgaagatccccacgaaggcaagagagtaaatttacaaactcatttgcgtccggaatacttgcttctttttcactcatacattccttctaaaatgtgggctttctgtgtacatgggcgcgcattcccaggactcggttccctgggtggaattcacccaggaatacaatcgattttctgaacctgcgtaaggccacaggcagctctgaaaatgaaagcgtttgctaagtgggggagatctcaccgatcgaacgtttaaaaatggctttgtcttcattcagctctcccgatttattctgtgttttacaaatagaagctcagagcttctgtcgcccagtccttgcatgactcatggcggtggccacacgggtttcagggataacgggatgtttagaaaatcgctgcatatcggagtttcctagcacgttccatttatactgaacgcaggcggccgctgaaaatccagcctcgactcttgctaatgactgggtaggaccctcggggtcctgcgacggtgctggagggtgttcccggctccgatgtggggaggcctgcgcggggactaggttctcgagaggcgagcgggcgcgccagagaacccgagactgctgcggggccggatgcgggatccctgggctgcggttctacgcagaaacgccaatggccatgcctccccagctcctcccagccccagtcactaggccggcgcctggcccggagatcctcccagagccctggcggtgccatcatgccggagaagacaagctcggccccgctggaattcgctccaaacacagatgctcatttttggaatattctagaaaaataacaagatcttgtttgtcgttatgattcacgggaggtaactgatgggagggccatttacatgagggcagacactgtggggcgaaggtgacttctggacgtaggctttaaagtaggaacggctccaaattcccaatatctccggccttaccggttgcaaatcggacccctgcgggaaaaccagacacttctgtttcgtggctttcgggctgcctccagcccacgcaggctcgtttagtccccgtggagtcagccccgagccttcctagtcctggaacaa

SEQ ID NO: 3380 - DNA, 262 bp, Homo sapiens
tccgcctgccgggagggagggaggaagggacgaagcgaggcaaagtagggaggcgagacccagaggcctttaaagggatcggtccgctcccacggtgcccctcggagcacgccggccgcccgcccgcccgcctggcgctgctgccaccgcgtgctccaggaggtcctttccggggaggccgtgcgagctgcacgcacactctcaacacgcgccacctcggcacctcctcgcggccccgggccccaggagagttgggaggtgg

SEQ ID NO: 3381 - DNA, 140 bp, Homo sapiens
ggctcccgggtcccggctttgtgcagagctggggtgggtaatcctggggccaggtctgccccctgcagtgccttgaccgtctcctgccgctgcctcagctttacccttcaagctcgagtcggttcccgagctctccgtcc

SEQ ID NO: 3382 - DNA, 158 bp, Homo sapiens
aacaacagcctcagaagtcgccgatcccgaggccgggacgccgggaggcagccgcccgaccctcccggcccccacccggccccgccgccacctcattgggctaaaaataagaacttccgtaaaagaagcgaaagaaaagtgaaagagccgcccctgcg

SEQ ID NO: 3383 - DNA, 116 bp, Homo sapiens
ggaaggatgcgagtgggacgggagagaaacggggctggcgcctgaggtctgaagtgggagtatgagtcgatacagtgaagcactgaggatgtgggggagaggaaacggttttggag

SEQ ID NO: 3384 - DNA, 213 bp, Homo sapiens
gtgtgtgtgcgtgcgcgtgtgtgtgtgtgtatgtgacttccttctgcctttatatgggctcttaaaatgagaggagctgtgtcctttatggctgggtgtgtggaaccagacagggcacagagtggggagtgttgtggccgtgccccacttccccttatagtctgcatgccctccttctggccgccccacctggctctgcctctcaggggtgtc

SEQ ID NO: 3385 - DNA, 136 bp, Homo sapiens
cagccggctgagtgggaaccgcgcggtgtctgaggaggcagtcggcgaccggtgaggggactgaagggcaggggagggcaagggtggctcggggcagcagtcctcagctgtggctagtcttctcccatctgcctcg

SEQ ID NO: 3386 - DNA, 145 bp, Homo sapiens
gggtgggagggtgaatccccagataacccgggcagcaatcaggaagtagagcttctgccccagaagaagaacccatggggctggcttgaagccagagagatttgcagccattttcctgtttcatatttatcgccttctctcccac

SEQ ID NO: 3387 - DNA, 146 bp, Homo sapiens
gtaccggggcagtgagggagggatccctaagtgcagggcgcacacacggggcggagacctggaggcggcagcaccgcgcccccagggctctgcccagctagccactcgcagcacagagaagcgcgcccgcaagacagcgcagcctc

SEQ ID NO: 3388 - DNA, 488 bp, Homo sapiens
gccggaaaaaacctagtcctcccaggttagcacgccgctctagcccagcctcacgtctccactgcttctcagccagccaacgcctcttctgattggctctgacgtgcgtggtgcgtgaaaacgtcacgagacgccggcgttactataagagcgcagccgtggcgcttgcgcgcctctttctcagtgaccgggtggtttgcttaggtgaggtgcggcggtgtgctttttctctagggtttgggttggatggtggcccgggccttccgagtttccatgagtaagctaaagacgttaggaaacagagcagggtggttgaacgggagtgcagcacggttgtgggggcagatactgactatgagagcgttggaggttattctcgcgagatcggatctgggctccgcgaggttttggcgtagttgtgggactgcgcaggcgccgtttggagcccttacgctcacacttctctcccgcgcaggcgcagacgggga

SEQ ID NO: 3389 - DNA, 142 bp, Homo sapiens
ggccaacctttgggggtcccccagcgcgcagaggttagcgtgtcgctgatcgtgtggcaggtgaaggcagcaggagcgcggatttgggttagaggccgtgtgcgcccacagttgtctgaaggagagacctatttttcttctc

SEQ ID NO: 3390 - DNA, 1094 bp, Homo sapiens; identical to SEQ ID NO: 487

SEQ ID NO: 3391 - DNA, 174 bp, Homo sapiens
agtccggccctgcccgaggcgggggaaccgggaggtagggccgcacacttggaggaacgttgcctgggggttttgttcgcgcacccgccccttcccctctcccggtaaatgtttaacaccaccgctcatccccaagtccagttctctaactcttccttcctccggtcctttagt

SEQ ID NO: 3392 - DNA, 252 bp, Homo sapiens
ccgcctcacggggacacctagacgcccgtccctggcgagaggtgtcgtacgctgtggtttcagcgccagggtctgcggcggcgcggggagggtgttgtgttttgcgagcgcggagccctggccttggttttgttgtggtcggcgtcgtgtcgccctctcttctgccgccccgcacttcctttgtacgtagttaataagcagtgtcgctccacattcgctgtcttttgcaatctgatagcttttgttttggtg

SEQ ID NO: 3393 - DNA, 151 bp, Homo sapiens
tcctggtaggcgctagctgggatcgctcctgaagttcctcgctgccaacgccacccaagggtggcgtggtggccagcgccgctcggaagacgggcaaggagaaacccccgaagcggaacgttgagaacggaggcccagttaagccaccctc

SEQ ID NO: 3394 - DNA, 138 bp, Homo sapiens; identical to SEQ ID NO: 296

SEQ ID NO: 3395 - DNA, 351 bp, Homo sapiens; identical to SEQ ID NO: 472

SEQ ID NO: 3396 - DNA, 175 bp, Homo sapiens
gcggtgggcaagacgtgcctactcatgagctatgccaacgacgccttcccggaggagtacgtgcccaccgtcttcgaccactacgcaggtaagcctcggaactgctgactaaggggccgctccccgggccgggaactttggagcaactttggcggagccccctcgccgcctcccc

SEQ ID NO: 3397 - DNA, 241 bp, Homo sapiens
acatttaagacagcccctaaacttggggagcgcgtaggctcatgggaaatagagtctgttacttgtcctgggaccgcggtgggtgtccggggaggcggacttccggtgcactcctgcgcgtgtgcacctctccctgcgtgcgtgttcgcgcgtgcgtgctcgcacatgcgcgccacctccgcactgccctcgcttcctgcgcctgttcaggtcatcgcttgctctggttcccaggctttgg

SEQ ID NO: 3398 - DNA, 283 bp, Homo sapiens
atccaaggccagcccatgccccagcgagtacggggaaaagagaacacagatgccctcccggactgagaactggttcatggtcagagtttctgggaccgctttagtttcttggctggcaggaagggaacctggcaggccgaaggacggctccaagccctggccggcccctcactcagggcaagtctttggaaatcaaggttaaagctccccgctgctgccccgaggcccgggcttccgcagggcggctcacccgcctgcagcaagagagggagggaggaagttg

SEQ ID NO: 3399 - DNA, 157 bp, Homo sapiens
ggccccacgcccatcctccctcccccctgccctctctcccgtggctggcggcaggtgagtgggtgtcgaggaaccgccaggcagcggagaaaacaggacgccgcagaaatcagattactcacctgcagctgctactacccagggctaataaaagcag

SEQ ID NO: 3400 - DNA, 140 bp, Homo sapiens
acccgacgccgcggcctgcggccactctaggacgccggagggtcctcctctcagtggttggggctgggccgccctgcgccgggagccgcccaccttcgggctgggccgggcctggccagagtctgggctaagcgcagggc

SEQ ID NO: 3401 - DNA, 174 bp, Homo sapiens
tcaccacggccaagtgcacatgagaactgcattgcccagaaacctgtgcgccgcccggcggcggcactcttaggggcgtctccctgcggacggaagctctctgggcgggacttccggtatcttcctcgcggtggacatcttgtcggctcttaggtggaaccatcggagcagaag

SEQ ID NO: 3402 - DNA, 314 bp, Homo sapiens
ccttttaaaaattctcttagccacgttgattgtacgggaaaagcctttttaaaacatcttttacgttgcttaaacctacagtttcgaaagcattccgaaggctaaagtgagaaataagcccaggctagggagaggagaaacgaagttcacgtcctagtctggcaccgggttggattgtcgctgggacggcagtcaggcatttggtgtggtcgcctaaggggtgggtccttcggcgggagctccgggaaaccccgtgggcctgcgcggcgttcttccttttcgatccgccatctgcggtgggtgtctgcacttcg

SEQ ID NO: 3403 - DNA, 118 bp, Homo sapiens
gggttcctcggccgagcggatcggccgcagaactcggcggagtcgaggggtccaggcccaggaaggacgccgccggggcgccccccgcccctcaagcttgcgtggcggcagcgcgcac

SEQ ID NO: 3404 - DNA, 186 bp, Homo sapiens
cctccgcgctgggacgccggggcgcgggcatccctgccgcctacggatctcttcccaagcacctagaactttccaaagcgtgcttggaatttaacaccttggtcgtcgatccccgcaaatatactctgatgagaccggctttcttcccataccgcccaggagtttctccaggtggcattcctgtcg

SEQ ID NO: 3405 - DNA, 145 bp, Homo sapiens
agaagccgaccagccttacggaggcgacgcccctccaggtttggattcgtccatacggtttccacggcagcacacagaacgccggaagaagctcaggaagccgactggctgtgcagtttccgttcctgttggctggggcccggaa

SEQ ID NO: 3406 - DNA, 136 bp, Homo sapiens
tctgggtacttcctgtagagggagatctaaaaacctcagggttttgaatgcctcgcccacaaaggcaggatacacaagggggacagaagataacgagctttctgggtctccagaatgacagactagcactgagtgg

SEQ ID NO: 3407 - DNA, 153 bp, Homo sapiens
tgatagttctgacagagtaattttagaaaacaagttgctgtgtaaaagaaaagttcggttttgataaacatcctgattaatgttcgcatttccagtctgaatggcttttatagttatcatttgtcaatggttcttagtgttatgtgatagtgg

SEQ ID NO: 3408 - DNA, 284 bp, Homo sapiens
ccctcgcgttcagggggtgcatataaacgggcggacaccgtccctggggtaagggaggcgccagcaagaacaaggcgggccaccaaccccgagcgacctcctaccggacggatccaaacccaaacattgtccattccgggccgaagtctcggccttcacttcacttccgccttcccagcccgtgaacacgaatgcgcctgcgcgcacctctctcagcggaagtaatagtgacaaagctgggttcgcggctggcccaggagtgcggggcgcgactgggcggccgg

SEQ ID NO: 3409 - DNA, 1770 bp, Homo sapiens
caggaggagaaaggagtcgccataaaatgcacccgcgccaccctccatgtcccccagtggaattgaggatcttgcttgtggcaaaagtgcgttcttggcaccacagccccgcagctggggaggggggcctcagtacccggcttccgcaattttccaggcgtggaggtgaggggtgcttgcgtgtaaactgtggcaacccccagaatcaggccctggctcctgcactttcggaggtgtctgttgcagaccacgaggaaaagaggggtcttactcaagtcagggccggacagaactccaaaacttacgaggacagctatccaacactgcctcacagacccttaggcgctgccccctctttgcccctgtcctcctgcggtgcgagaaacccgaccactctgcttctacccgaaccccaggacgcaacagtaaaatcaaggcccgtcgttgaactcccaggtctgcgcatccctccctcctggctccctggggtcttggccccagcaggtccagtacccatccccagagggacccactaccctgggcgtcccagggtgccaggcacgatggcctgcaatgggggctgcaatttaaccgaggcgagttaaattccttttgccggtgcctggctgcgaggacaaacgtccgtactttcgttcgggagccacgggcagtccaggggcttgggttagaagcaacggctctcttccaggggctgtgatccgggtcggccagggagagcgaggccccggggtcctctgtgaggtccccagcgaagagacgcagctggggaaggcgccgcccccgggccccctgcgccaccctaaccgggcctctccttagcaaagttgacaaattcttgagagtgtcagcccagggctgcgcgtgagggcgctgggaccggggaggaaagagcacctgccgcgctcagcccgactttgaatttgtttgttgttaccgtttttgtttttcctcccagtttccataaacgcttagtatttcgaggcactttgcaggtgttggcgcaggtgatgatgggcctcgttggactctgcctcccacgcatccttttgttttctgcgcgccagcctgtctgactgtgtcctgcggggaccccgagacagtccggggtcagggcgtagagactcatgcttgccacttgacccatccgcaacccggggaccccctagcccgtcgcggagctggagtttgggcttccggctcccagctctccgccctggatacaggaagagggcgggagaggtcgcgcacccgcgccgctcggcggggatcgctcacaggggctccggggccaccgcgagcgcggactgcggctgctggcgggctccttcgtcgtccaacgcaccccatcctctcccgccccgcagtgtcccagggaaggcttcactgaaaacagacgctcgacggaaaactgactctgcaggcccgagctttcggagtttgatttctgtgggccccttaaacgggcactgggtacaggagaggccccaactctctgcagggacggggagggaagggcactcactctcccgcaagttttcctagaggcgagctgaagatgcaggccacctccctcccgcacggcccctcccttggcctagttctgtccaaagacacttcccagccctcgagcggcggctcctccactcgattcctgcctacacgtgaagagcttggacccagcggggctgcactcgggaggacaggcccagatcctgcacggccgggaggacacctggccccgctgtcttc

SEQ ID NO: 3410 - DNA, 133 bp, Homo sapiens
acgctgaagcgctgcaaagaagccagcgactcaatgggtgcgtcaactaggcagccgcagcactgggagtgcggcgcgggagtgacgtcaccaggcggagggggcgaggccgggcccgcttctggtcacttac

SEQ ID NO: 3411 - DNA, 152 bp, Homo sapiens
accgacagcggccccgagctgcgctgcgtgttcaacgggaacgcgggcgcctgccgcttcggcgtcgcgctgggcctcggagccttcctcgcctgcgccgccttcctgctgctcgatgtgcgcttccagcaaatcagcagcgtccgcgaccg

SEQ ID NO: 3412 - DNA, 138 bp, Homo sapiens
cacccctcgcgcggagccctgaggcagtcagcgtcctccaggctagggaaaggcgtggttttccttccccacgtctcccgtaaggcactgctgccagcccagtactactgcgtcttggcaaggctggaggtgctccca

SEQ ID NO: 3413 - DNA, 160 bp, Homo sapiens
tccctcgtccgccgacccgggaaggggcgggggcctacaggaagtgggcggggctggctcgcagggcggagcctcgcctcgctctgtgcatcgcaggtgtgcttgctcccgggctggtggggccaccctgtggctgcctgggctggaacgttctgcctcg

SEQ ID NO: 3414 - DNA, 145 bp, Homo sapiens
agatagttggatactcggccatctgcccctcgaaagaactcatagcgccgccgatcccagagtccgggaccccaaaaccgcagctgaagccaaggccagccctgaccgcgccgccacttccgggaagccgcgcgctgcctcgcca

SEQ ID NO: 3415 - DNA, 84 bp, Homo sapiens
ttccggagccgcggccactatctccccatgcgcatgcacacccggctctcccttccaggccctccccaccacgtgggcgcggcc

SEQ ID NO: 3416 - DNA, 214 bp, Homo sapiens
gagggacccggttgggcccggggcccggctgcactcaccagcctgggtgatgtctgacaggtcgtagctacgggccgcgccccgggggaagtgcttcaagcgccggttagacaggttcagggtcccggtggccacggcctcctctagggcccgctctgcactgcgtctccccggcagacctggagacccgggcacggaggtcgtggctgccgcc

SEQ ID NO: 3417 - DNA, 242 bp, Homo sapiens
gaatttacttccgccagaagtcgaagccaatccgcttttgggctatttccgcccgcgtttcttctactccgaagtgcgcctcttagtggtcagaagagaacaagacagagacttcctaataatttcatcaccgaatttagacagtaaatagtaacgaaaacagctaacatgcgatggagttcactatgcctaccacaattctataacgtacccctattattgtctccattttgcatatgtgg

SEQ ID NO: 3418 - DNA, 156 bp, Homo sapiens
gcacacagtagctgttttacaagggttgaactgactgaagtgagattattcctcgttgtctcggaaggcagagtgtagccgccagtccttccctcatccggaaccttctggtccacatttccttccaagcgttagtcctcggctctccatgcttgg

SEQ ID NO: 3419 - DNA, 149 bp, Homo sapiens
cgggcgggctgggcctggcgggaggccgcgccctacgggtgctggtggacatggacggcgtgctggctgacttcgagggcggattcctcaggaagttccgcgcgcgctttcccgaccagcccttcatcgcgctggaggaccggcgcggc

SEQ ID NO: 3420 - DNA, 585 bp, Homo sapiens
aatgccactgcccctccgcgtctcctgtagacgctctgctcaggatgcggggcgcaggacaggcgcttcctggcctcagcgtggggtggcccggccgcttctggaagacccctggcgctgtcccccgcctccccgggctgtcactgccgactcgggcctgcccatctcccgcaggggcgctcgggcctggccgccaagctgggcgagaggccggggccccccttccatcacgaggttcctgccctcggctcggcctagtttccctagccaggagaagtcctgttttcaacgttctagaaatatccccgcccggctgagcggggggaggcggagatcctgagtgtcgctgctgcctcctttccgtgcacacaggaaaccacacatctgacacgcacaagccaacgaatttcccccgaggaacacgcttgtgtgtccagcccccaaaacaagaacaagaacgtgggcggcggctgctcgggagcccccaggcccgcccaggcaccacggcaggtcccgccccacttccagccctgcagacacgctccttgaactcgactccttcagctcaacctgccctttcaggag

SEQ ID NO: 3421 - DNA, 128 bp, Homo sapiens
agaactgtagtgaatgctggcattaagcgcaagggacaggcagtttaggttaagcctggaagtttgaaccggcccattatctttgagatacactggtgttttgaaactctcttgctgaggatattgta

SEQ ID NO: 3422 - DNA, 187 bp, Homo sapiens
acagatgaggtcagctgtccccgccggccgattcgggcctgatgggttgggggttccgatgtcctaactgctaggatcccgttccagcccctggccagagctgtgtaccacaaagaagggagtttggagaaacccgggtaagcgcggcagcgccccgcttgggacagcggatggctgaggactccca

SEQ ID NO: 3423 - DNA, 155 bp, Homo sapiens
gccaagttagcctgctgtggccagctctttactttttccccccgaagccccttcagctctgttttctctttcggggtcatgaagtttgtccacggcccctactcctgacagcctctgggatgggtgctgcggaggcagcagcagccacacagaaa

SEQ ID NO: 3424 - DNA, 161 bp, Homo sapiens
cttactaacccccactgcgccatatgggtaaatggaatgctgaggcttaggcgcccccttcccctgctgggatccgggtaggatccggttgcctttctgcggtggaggaggaagtgttggatttcagcgctaaggcgtcggcggtgcacctcacgtgcatg

SEQ ID NO: 3425 - DNA, 144 bp, Homo sapiens
agcgttgttccccgtgaaagagcaggcaagagaccaggctaagtcacttccctaaaggatcttatctcaatctgatttcggattcccggggttcaccatgggatcaggcagacctcctgatgtatgtgctgatgaaaagtagga

SEQ ID NO: 3426 - DNA, 454 bp, Homo sapiens
ctctgtccctaggcccctacgagaaccgctcggtgttcgagtcgctggacctgggctggaagctgctgcgcatcttccccaaggagatgctgaagcgcattccgcaggccgtgatcgacgagttctattcccgcgagggggcgctgcaggacctcgcgcctgacactgcgctctagccccgcgcgccgtggcaccccaacaccggcagggaacctaccctcggctcccgggtctcccctccctcgccaccccaaccagcggcttctgcgccgccctccgccctccgctggctccgaggtggtgggggcgccgcacgctccatccctttccctcgctcgattccttttcccgcgctccatgcctccccctcgactcccggtgctgcggaagaactgaaggttgcgatgccttactctgacgggagcatctgtatttttatgttaaaagcccacaa

SEQ ID NO: 3427 - DNA, 149 bp, Homo sapiens
gagccgccgtcgccttccgcgggttcgagccccgcccctgccaggccttgcccatgccccattttacagaagaggaaacggaggcgcagagagaagaaataacttgctgagggtccgaaccaggctcagaacccaggtttcctggctcc

SEQ ID NO: 3428 - DNA, 186 bp, Homo sapiens
taacttctaatctccacagccaatcagttcttggaaccgcacacccgatgccgacatccctctcttgttggctcccctcgttagcgggattcaataactaaacgtccatttctagcattgactgaagagctcaagcttgacactcgacctcaatccttagcagcaccgcccaccatgctcccggaa

SEQ ID NO: 3429 - DNA, 131 bp, Homo sapiens
gcaggagcgagcgcgcgagagagcggggcatttctgcgcagctctagcgcgcctcggagcccgccggggcagccgccggacaccaggaccgcgagccagacagctcccggaagccgcgccgccgccgccag

SEQ ID NO: 3430 - DNA, 136 bp, Homo sapiens
gggacgcgcgaggacgccgtggcgggagaagcgtttccggtggcggcggaggctgcactgagcgggacctgcgagcagcgcgggcggcagcccgggggaagcggtgagtcgcgggcggcaggcccagccaggtggg

SEQ ID NO: 3431 - DNA, 325 bp, Homo sapiens
agcaggtcctcctcagactgctgtttggagctgcctttaggagccatggcggagctgcaggcgagaacagggaacgtagagccggccgccaaggcgggcaaaggcccttgactccgcccctgcggccgccgtatccgctaacgacccgtcagcgcggcgcgcggaggcgggacccggtttggcgaagagcaagcgtccccaggattggccagcttggcgccactagataggcttccgggcgtgattgggcgagcgggccagacttccggattcctgacaagccacgtgacccacccacctggaggagagagaagggatttgtagt

SEQ ID NO: 3432 - DNA, 144 bp, Homo sapiens
gaggttattaagagtgtggactcagaagtcagactctcttgggttccggccctcgctctgctacccactaacagtgtgaccttgagcaggtcatttgttgacttagtgtccgtttcctaatttgtaaactgtggataataatga

SEQ ID NO: 3433 - DNA, 323 bp, Homo sapiens
gtagtatatggtgatagtgattctgccgaggcacacgtcttgatgaaagtagcaggaagtgagctgctcagctgctgagggagccacgtcctgccacacagccaggggaggtggtcgtcctctgttctttgtcctgtgtacgttcagtggagaaaagtacagagtggtatgtttgaatgtggggatgcgtgaagatctcagtatgcttcatggaaaagatttggggatgcaagcccttagaatgcacagggtctaacgtactgcgtcctctattctaaaagccccaatgcgcttcctcctgagcttttattttgttcagctgg

SEQ ID NO: 3434 - DNA, 245 bp, Homo sapiens
tttctgaccatagtggaaacgtcattgagagcatgagaaagaaggaaaaggatcagacctacctgggctcagattctgggtctcctggttatcagctagatctttgataagttttataatagctgagctttgtttcctcgtatgtacagtgctactgagaattcacatttgtagtggtttgtggttttggttgataagctgaccgatgacggagtgctgtgaggtttggcaatcctgaccgctag

SEQ ID NO: 3435 - DNA, 150 bp, Homo sapiens
ggcggcggcggcatgaaggtcacgtcgctcgacgggcgccagctgcgcaagatgctccgcaaggaggcggcggcgcgctgcgtggtgctcgactgccggccctatctggccttcgctgcctcgaacgtgcgcggctcgctcaacgtcaac

SEQ ID NO: 3436 - DNA, 167 bp, Homo sapiens
tgcccactgtgtaccaggccctggcaggcgccatgatttccgtatctgggtcttcctgcctcctcttgctgtatagacttggggcccgggcgggtctgagccacagaaagcacacagctgttcataacaaccacgagaaccacagaagatggctggtggccccagga

SEQ ID NO: 3437 - DNA, 342 bp, Homo sapiens
ccgatacattgccacggtgcccccctcgccctcagggtgtcaggacggtcctggcacgtggtgggtgctggccacatctgctcactcagagaagaagcgaaggaaatgtgaggtcaggccgccactgtggctggggcaggggcctcacttgagcctcccagcagcttcccacagtctcacgtgactgagcagcagaaacacacacaggctgggtttcctgccaggccccagagacatgctcagctctcacagggaggaagaggccaatgggctcgtggtcactgccagagctatgacaggcacccgcgtgcctttgagggggtccaggtctcagctgccttc

SEQ ID NO: 3438 - DNA, 358 bp, Homo sapiens
ctcctgacctcaattttcctaagctagaaaggacctttcgaccctccgacttgtgcccatagtaaagcggcggccctaagacgacgcgggggtccttgtgcgcacttaaatggagtcggctgcgcttggtgagttcccacacccggtagatgtgagggaaaaactgccttactcagaaggcaccaccccttgcgtcggccgcggactctaggccaatgacgggccaggacacgggcgatttctgcgggccagggcggcggaggtgggacttccgcttcgtcgcgtgacgtcatctccgtgagcaggattggccctggaacagtgtggggcctggaccgctgggtaggcgcgtccagcg

SEQ ID NO: 3439 - DNA, 189 bp, Homo sapiens
cgcgccgcctcctttctgcgggccgggcccgtggtcacccggcctggacggagagaggaggtgagaggggcgctgcgttggcctccatcgactgtcggcctttttcagaacgcctacttcgggtcaagcttgtgttagggaatgccagagaagggcaccgccttgaacaggacatcatccatccatccc

SEQ ID NO: 3440 - DNA, 239 bp, Homo sapiens
gcgcctgacagaatcagcaccacggccagcgcctggcgacggcgccggggatcgccgagcggggctgggggcgggggcgcgggaggagcggcttaccgtaaagtctcatgcaaaggcgcagagacccaggggcaggagcccaggctcccgctccaccgcgactgccctactcatgtgggcacacggcccctgcccttctgcgctgcccacccccagccaagcatgccaccctctttccc

SEQ ID NO: 3441 - DNA, 145 bp, Homo sapiens
gtgtggggcagacaaagggcacgaggaaagcagccccttcctgcccctccctgctgacttcccaggctggtctgtatgttttggtgtcatggcaactggctgtgggggctgtacgtggaaagtgaagcttaaccttaagacactg

SEQ ID NO: 3442 - DNA, 154 bp, Homo sapiens
ttgatcgggaggggccagggtccttgctgagaggacccagccgatactcgggcctctgtgttatggctgagggacgtaagacaccaaggaggaagtgactgccaagatctcagctggatggaagcatagttgggaccgggaccagctgtggggc

SEQ ID NO: 3443 - DNA, 307 bp, Homo sapiens
cacacattctacccagactacccagctgtaagcagagaggtgtagatccaagtctcctgccggcagggtgatttagcgcagttgtcaataatctgtacaacacgtaacaataaagttattgatgttgaggaaaagacttccggtaggggcatttctatttccattgggtcctgtcttctccaccttctacgtttcaaccggaaatagtcgtacccatttaaagccacgtcggtactggcctcggtcccgccccccacactgcggaaccgtttccggggtcagggcattccgtcccgccccgccgccg

SEQ ID NO: 3444 - DNA, 219 bp, Homo sapiens
ctctgctgctccagcgaagttcccggccggccgctggagctgcgggaagcggaagtgctcgttgggggtgcacaaggcgcgttcgagcagcggcgaccgacgcggcgaaggagcgcgccatggagcatgtgacagagggctcctgggagtcgctgcctgtgccgctgcacccgcaggtgctgggcgcgctgcgggagctgggcttcccgtacatgacgc

SEQ ID NO: 3445 - DNA, 147 bp, Homo sapiens
cggtctgtccctgccccctctaggagccatttcgatccgtaccttgggacccgacccttgggttagcggtgcctgtgagagcgagtgggatgggcagagacaggcctttggattgggggagcctctaggggaagaggagagaggcac

SEQ ID NO: 3446 - DNA, 145 bp, Homo sapiens
tccttgtaaatacccgctgctgcggtggccctgagcgaggaacaagccattcggacccgaccgatgtaaatacagccgcccgtccgcccgccttcctcccgggctccccggccttgcccgccccctcccgggcgtccctgtccag

SEQ ID NO: 3447 - DNA, 146 bp, Homo sapiens
cagcgctcagccggagtccccgcgcgcttttcgggactcacccgggagatgtcggggcctctcgggaagagtgggctgcgcctgccttccgcggccgcctcgcctcttcgctgcgcgggaccgtggggtttgagagcggcgcctcc

SEQ ID NO: 3448 - DNA, 158 bp, Homo sapiens
taaggaagtttccaccacccacgtcacctgcaaaaccaccacgtaggaagcacactgtgaacccctgagagggagcgtggctggtacataaatccttgctttctctgcacgctccttctgggacttttgcattcaccgcagagagtgggaactgtaaa

SEQ ID NO: 3449 - DNA, 155 bp, Homo sapiens
ctgctggggcactgggcagcctcccttcccgatggcaccagagcctggatttttgaggtctggtggattcctgagactttccttcctcaccccagtctggatggcatccctgggcccagcctgccgcggcactcgtgggaagtggctggctggct

SEQ ID NO: 3450 - DNA, 124 bp, Homo sapiens
aaaaaaaaaaaaaaatccacacggtgagagctccagtggcgtcagggtgcacgtttctccatctccgtgccgtgagcttcatcgcgggtagaaaatggcttggtcgctggtagggtagaagggg

SEQ ID NO: 3451 - DNA, 135 bp, Homo sapiens
ctccgggactgcttgggaggacacctggaatgccgaaggcaggactacacaccgggcgaatccaccagcgccaccaagcccttgaaaacccgaggccgccgcgcgactccatttcccagcgccccgcgcggcagg

SEQ ID NO: 3452 - DNA, 147 bp, Homo sapiens
cgggcgcacggaaataactttgaaactcaagcgcgttgggaatcggaagtgctggggggcgcgtgttggggcgcgggccggccgcgggaagtggcggcgagcgcccgccggccgcgctgctctttgttcggcgccaggccggcggtt

SEQ ID NO: 3453 - DNA, 153 bp, Homo sapiens
tggaagtcgcttgcgactcacttggggcgtggggggctcgaaaccactgagtagagcccgctcccgttgcttagccgcccgtcgccacgggaaaggggcggggcacgctgtattaggcgagccgagattacttgggccaaaggcggttgctag

SEQ ID NO: 3454 - DNA, 139 bp, Homo sapiens
ccacccgcctctggcccttccctggcttctatttccagctctccttggctatttatagctgcgaccggccggcaattgcgtcagtcaggggcaggcttcggccggcgatgccaacggtgccaccagtccccctacattc

SEQ ID NO: 3455 - DNA, 247 bp, Homo sapiens
cttgcctagtggatgcccccctgcaacgctggccacacacagctccggactcccccctgtcctggcctccctcgccccggcccacaatccacagcaaacctagcctcccaacctgtggcaggtcctgagcctggagtcctcaccacctccctgtgggtgaccactgacaacttcctgccccttcccctgcgttccccaccccagggaagcgtgactcccgtcggcatttaactgctactctgggttt

SEQ ID NO: 3456 - DNA, 274 bp, Homo sapiens
aaggttgaaaggaggcggctgaaggaaagagtagacgaaccggcggcggcgcccagcccggggtcctcaaggaggccccgcccactggccggaacccgagcccgcccctctcaagggactctccccgggcccggccattggtccggtatggaagcggggcgggaccttagcccttgacagcagttgtgacggggaggattggaccgcccggattagggctaattaagggtggatgggtggcgggcggggaagtgcgggtggctaaataggtgcc

SEQ ID NO: 3457 - DNA, 314 bp, Homo sapiens
cctcttcaaaaagatgaaagtgttcgatctgcctcctcttggcgcagccagcactcgagggtcaaaatggcattccccgtggcccgagccttgtctaacccggccgtgccgccacccgcactctcgcagagagcagggtcgcctggggtgggtgaaggggtctcagtcttgcactcacgtgaggacatagttgacgctgacgatacagtgtggcctggaggagcgactgttgtgcacgatggtcgcgtagctctgcacccatacccagccgccgtgtttcgccaggaacctgtagtacttggtggtcacctgtc

SEQ ID NO: 3458 - DNA, 252 bp, Homo sapiens
aaaaaggagagcagggtgatcgtgggtgcgggtctggagataagagtccctgcggttgctgtgggcggggattggtgggcatggctggcagggctggccagcgtgggcaggtggcctgaggagaggggggacaggcctgctcctccaaaggtcccctcccagccccctcctcctgtccacattcactcagaactcaccagctggtcacatatcctccaagctcctccgggtgagctcgggaactaagagcag

SEQ ID NO: 3459 - DNA, 207 bp, Homo sapiens
ctgagggaataaagtgacaactttactgcgtctgtagggagggcacaggatgctgttgagggcctggctagagcttgtggttgtaagttgaaaatgcaaggagtcaaactggctttgtggttttctacaggaacgttcagtcgctggtgcaggcatggagagggtggatagctgggtttagctcgacttgggatttagccaggggag

SEQ ID NO: 3460 - DNA, 163 bp, Homo sapiens
gggcggctgcgtggcgctcgcggctggctccggcgcccggtggccgcggagcaggcggagaatttatgaatggagagcgcggcgcgggggaggccggcgcgagaggaggggccgcgcacgtgaccgcgttggcggcgcgcccgctccgcgcgcccggtgctgc

SEQ ID NO: 3461 - DNA, 147 bp, Homo sapiens
ttagagggaaagagaaaacctatttctgtccttttggagacaaaagctgtaacacaattggttaaaattcggggaatcagatcctcctgggcggtgggggaaatactgctgcaggaccgcggagccctggcttcaaacgcaggctcc

SEQ ID NO: 3462 - DNA, 247 bp, Homo sapiens; identical to SEQ ID NO: 566

SEQ ID NO: 3463 - DNA, 272 bp, Homo sapiens
accttcctgcggcagagcccgccctcatgctttctctgattggcccgaggcgctgccggccgaaccccgctcccaacccattcttgagtgcacttggagagatgtttcctccaaccaatccagagagcgttctctccggactttccaacgattggatggcgaggataaaaccgtcgtccaatgatcctgcagtcaccaagttgtcgttagcaggggttcacggcagtcgttttcttccgtttgcttgtgtctttggaataaaacgtccaaaa

SEQ ID NO: 3464 - DNA, 163 bp, Homo sapiens
cccgggaaagggctattaaagggccagcgtcgatctcgcttgtctatcacgatagtcgcggtgctgcgactgaacgcgcctgcgcggaaagggaagcatccacccttgccgattgccacctctttaaacgctgttccttcacttagcaggtgggatcaagctg

SEQ ID NO: 3465 - DNA, 138 bp, Homo sapiens
taagcccagccccgcatagactcacccgcctgccttgcctcgcttttccctcagccgactccacgggctgccgcgtcctcacaagaaaccaccgaacgagcgtcggggaaaaaactcttcagaaccgggcctgattgc

SEQ ID NO: 3466 - DNA, 143 bp, Homo sapiens
caatgggagcggcgcactggcctcccctttaaggaatgttgtgacctgacgtcaccgggcgagttacctcccgcagccgcagccgccgtgctcagcgcgagccccggagcccttgagcgcgaggcgcggagcccccggagccc

SEQ ID NO: 3467 - DNA, 154 bp, Homo sapiens
agagttgattcctcttttcatactgacatgcatttgaatactgttatgtaattaggaatgcggtttgctggcgcactgcccaggacacagaggcagagcatcacagcatcacagccttcttgaaaagttacaggagccttgaaataggcatgag

SEQ ID NO: 3468 - DNA, 147 bp, Homo sapiens
ttttccagttgctccacacacagtccatcttggtggaatcggcagtggcctgcatcgtgcgggctttgggggctcgccgtggctctcctcgggggcgccgagcgtgcactcaagcgttggtgcccggctgctgcggctgggctcgca

SEQ ID NO: 3469 - DNA, 155 bp, Homo sapiens
ctccctttgcccttcttggaatgcaccaaacataaaagcattttttttcaagctttactttcactttcgagagtgccgtctatttgccacacacttccctgatgaaatgtctggatttggactaaagaaaaaaggaaaggctagcagtcatccaa

SEQ ID NO: 3470 - DNA, 174 bp, Homo sapiens
accacaaagcctgctatccttgggcgtcctcatgacccttggtcatgaatgggaccctttcatgtatggggacccttggtaatatgaatgggacgccttcagctccccagggcttccgaggaggccgagaagggcaaagacacttccgaggaggccgagaagggcaaagacatt

SEQ ID NO: 3471 - DNA, 149 bp, Homo sapiens
cctgctgctagtctttaacatgggggtgtgggggggttcgcggcagccgagtgccaaggcctgggaagcggcgcggcgcgtgcgcagtggcgttcggcgggacccgctgaggcaaagcggagccgcagtgacagaagcaagcggagcgg

SEQ ID NO: 3472 - DNA, 414 bp, Homo sapiens
ccggccagggcccgaaccagagccccaggacagcggcgcccagacggtacctgacagcgcctgaggacaaccgggtacacgcggcgtctatgaagcgcaacagtgacgccggagagtcactgcaacttaaaggctgattctgccccgcccccaagacaccctcgccgctcattggctggggcggagggcaggataccaatcgcgtgggtcccgtcctccgccccgccctccggccgcgcatcaaggatctttgctcctcccgcggattcgatccgcgctcgcgcctcctgagcccgccggcctgtacctgagctcaggcccctcggtcgcctcctctggcgggacgagaagagtccttgtccgcccttgctgacgagaagactgaggcccgaaaaggaaaagtctgttgggccc
